United States Patent Application Publication US 2021/0254182 A1 - sequence listing, part 6

SEQ ID NO: 92 - DNA, 6830280 bp, Phytopthora sojae (residues 1,707,571-3,415,140 of 6,830,280)
  misc_feature (116850)..(116949): n is a, c, g, or t
  misc_feature (449913)..(450012): n is a, c, g, or t
  misc_feature (684235)..(684398): n is a, c, g, or t
  misc_feature (689322)..(692253): n is a, c, g, or t
  misc_feature (695709)..(695808): n is a, c, g, or t
  misc_feature (704383)..(767052): n is a, c, g, or t
  misc_feature (1090814)..(1100813): n is a, c, g, or t
  misc_feature (1526343)..(1526442): n is a, c, g, or t
  misc_feature (1531123)..(1531743): n is a, c, g, or t
  misc_feature (1538912)..(1547265): n is a, c, g, or t
  misc_feature (1558805)..(1569699): n is a, c, g, or t
  misc_feature (1846672)..(1846771): n is a, c, g, or t
  misc_feature (2060558)..(2064921): n is a, c, g, or t
  misc_feature (2067168)..(2105998): n is a, c, g, or t
  misc_feature (2120976)..(2144287): n is a, c, g, or t
  misc_feature (2152081)..(2153418): n is a, c, g, or t
  misc_feature (2166625)..(2166724): n is a, c, g, or t
  misc_feature (2169618)..(2181259): n is a, c, g, or t
  misc_feature (2189220)..(2189319): n is a, c, g, or t
  misc_feature (2195851)..(2196581): n is a, c, g, or t
  misc_feature (2198717)..(2209061): n is a, c, g, or t
  misc_feature (2211746)..(2249613): n is a, c, g, or t
  misc_feature (2253993)..(2259139): n is a, c, g, or t
  misc_feature (2286108)..(2286207): n is a, c, g, or t
  misc_feature (2293004)..(2293004): n is a, c, g, or t
  misc_feature (2294764)..(2297229): n is a, c, g, or t
  misc_feature (3010972)..(3011071): n is a, c, g, or t
  misc_feature (3016492)..(3016682): n is a, c, g, or t
  misc_feature (3021422)..(3021885): n is a, c, g, or t
  misc_feature (3198681)..(3198780): n is a, c, g, or t
  misc_feature (3358360)..(3364844): n is a, c, g, or t
  misc_feature (3368464)..(3379166): n is a, c, g, or t
  misc_feature (3391216)..(3391315): n is a, c, g, or t
  misc_feature (5160212)..(5160311): n is a, c, g, or t
  misc_feature (5601576)..(5601675): n is a, c, g, or t
  misc_feature (5606896)..(5617696): n is a, c, g, or t
  misc_feature (5623782)..(5642643): n is a, c, g, or t
  misc_feature (5652685)..(5652798): n is a, c, g, or t
  misc_feature (5661179)..(5662574): n is a, c, g, or t
  misc_feature (5897897)..(5897996): n is a, c, g, or t
  misc_feature (6065830)..(6065929): n is a, c, g, or t
  misc_feature (6093671)..(6096991): n is a, c, g, or t
  misc_feature (6116449)..(6117808): n is a, c, g, or t
  misc_feature (6137192)..(6148306): n is a, c, g, or t
  misc_feature (6160785)..(6161254): n is a, c, g, or t
  misc_feature (6186004)..(6186103): n is a, c, g, or t
  misc_feature (6191492)..(6192578): n is a, c, g, or t
  misc_feature (6236919)..(6242523): n is a, c, g, or t
  misc_feature (6247395)..(6257394): n is a, c, g, or t
  misc_feature (6258996)..(6265732): n is a, c, g, or t
  misc_feature (6267174)..(6267508): n is a, c, g, or t
  misc_feature (6272215)..(6366464): n is a, c, g, or t
  misc_feature (6367167)..(6367492): n is a, c, g, or t
  misc_feature (6371823)..(6372269): n is a, c, g, or t
  misc_feature (6380696)..(6380953): n is a, c, g, or t
  misc_feature (6386254)..(6390992): n is a, c, g, or t
  misc_feature (6391939)..(6393915): n is a, c, g, or t
  misc_feature (6657526)..(6657625): n is a, c, g, or t
ggtctacggccctaagggcgttggcgccatgtacgtgcgtcgccgcccgcgcgttcgtcttgagcccattatctctggcggcggccaggagcgcggtctgcgtagtggcacccttgcgaccccgctggtcgtgggcttcggcaaggcgtgcgaagtcgccgcgctggagatggagaacgaccaccgatgggtgagctacctctcggacaagctgtaccacggcatcacggaccgcatcgagcacgtggtgctcaacggcgacctggagaagcgctacccgggcaatctcaacctgtcgttcgcctacgtggagggcgagagtctgctcatggcgctcaagaacatcgccgtgtcctcgggcagcgcgtgcacgagcgcgtcgctggagccgtcgtacgtgctgcgcgccatcggcgtgggcgaggacctggcgcacacgtccatccgcttcggcatcggccgcttcacgacggaggaggagatcgactacgccgtggacctgtgcgtcaagcacgtcacgcgtctgcgcgagatgagccccctgtgggaaatggtgcaggagggcatcgaccccaacacgatccagtggagccaggacgcgcactaagcgcaacggacggacggacagatacaggcagctggcgagcgagttgcaggcgagaagagatagccagcagagcgaaaacggcgagaatacagcacagacaccgaatccagctaataaacctctaggacgttttgctagttgtcgcacgtagcacggtgagtttgaaccgacaatgcttgactttttcgtagccatttttcgtgcggtcgttgcagtcacttgatcaggatccaaagctttttctcaccaagacgacaaaccgccgcagttaccgccgcaaaagtttgcctcgccgtgctggtcatcgacggcaactattatacatgtagcaacagcgccaccacaagcagcttttgagatacacgcccccttgccctcgcgcagcagctgggcctgatcaccagcggcggcggcgctttcgcgtcgagcttcgaggcggcgagcgtcgagcaatctcgatgtcgatcagcggggcgtgacaagcgaacgacacgaggtaaattgaagttgcctttgcgtgtctatgccgagtgagacatacttttgtatgggcttcactatgctgagcacgcttcaatcaggccgcttcactatgctgagcacgcttcaatcagaccgaccgaaaatcagggccacgggcatggcgccggagactacatcctcaaggttacatgtgtattgcctggtgttcaaggcgtgggtgcgctgctaatggagctctgcggggctatcgtcgctagtggccagacgcgtccagacccgaaccgaattcaaatccaggtcaataatttatgggttcggtagtacttggcgtttgtatggggctcttccaatcccttcggtgacagacatggcgagcttcgagcggcgccgtccaggccgcccccaatggacccccctttacataagtatgtacgcggatcggcagccgtgccgctccgtaacggagtccgttcgcctccgctttgcggtgagttgagtagcgtaacccgctttgcagtcctcgaggaactcattccgttcctctcggggtgctggcactggataagaaacgcatagagagagaaggccctcgtttcgtggggaaaactcagggcgaccctccagggttcgcgtttcaacaacctgcagcgacaagacctcggctcgaaagcagaggcaagcgccgtcggcgacgccgccgccagagccaaacgcagcggagggaagatcgaccgccagcagcaggcagcgcacaatagtcgccgccggcgggcatgtggttgcagcgagaatccgcgcggcctcctcttccgacgtcgagccgcaacacgacaacggcatcagatgcgcgtcgggttcacttgccttgagtatggcgccagccgttaccggcgcccagctccctttcgcagaggtagcagtaatcgatacaaaaagcaagtgagcttcggccgttggaaatctattcccgcggcgataaattcccgggcgcaaactggctttctggcgctgatgtccatctcccatacaaaaatccatagtgcctgcaaaagacggggcgcgccccctttgaattttaaataggctgcagcgtaatttacagcccggggcccgcaagcacagccttcagtctgccagcccattcccaaaaaagccacgcgcagcccaagcccaaacttaaccccaccactcttaagtcaagatgtacgccagcccccggtattcccgacaccacggcggcagcagcagctaccagacgcagcagtacacatcgccctccaagtacagcagccacgcgcagtacgcgtccccctccaagtacagcggctacgacggctactcctcgccggtcaaggcctcgtcttaccaccagcagcagcagcagtactactcgtcccccagcagccccacgtactacaaccaccagcagcaggagtactacaactcgggcgcgtccaccgcgtcctcgtcgtcgcaggagggcccgttctacgccgacgagctggacgagctggacgactacaccatgggcctcgcgagcccggacatgacgacgatccccaccgtccccacgcccatcaagctcagcatctacgagcacggcaagactccgtctggaagagtcatggtgacggccggcaaccagaccatcgagttcttctcgtgcgccgtcaacgcgccgctctcgcggtgtatggtggtgcaggagtaaagacaagtgcagaggaaagagtcgagtctggtgccgctgggcctccgcctcgcacacgccaaggacgagcctcactcctctgctgcctggtgctctgcgtcgcctgccgcgggtgttccaaagagatgctgatttttattttattacctctaccctccttcacgtgggaaggccaacactgccattacgtgtaccattataaaggcgagtgtggcccctcctccgacctgtacaagagatgaagatgatccgaaggagtgcaagtagtcgaagcccccccaacaacaaccaacctcccttgaagaacaactcccctccaagcgccgcagccccagcaccaagttgcagagtgagtggtgtgctcgcccaactcccgtgtgcgtgcgtgtgtgtgcctacgtgtgactgtcgcgtgtatctacgaacctatctagcaacctcccaggctcgccgaagcctccgcttttgttgtagaactacgaagtatatagtactatgattgccactgatgaatatgaagaagaagacgtcatattgtcccccatcaacggcgaatactccacagttcctctcctgcctgtctgcctgacttactcctgcgtggcggtctcgctctccgcctgcttgttgttggtgccgttgagtcgctcctcggccgcgacgcgctcgagctcgtccgccacggcgatggccttgatgagcgccgcgatccagccgttcatctcgtccaggctcgaggccgcaaagtgcagcggcttcttggggctgccgccgcccttgctgctgtgcgtgaggtggaactggtgcggccgcttgggctgcgagcggatgcgcagcgtgtacccgctgagcttgaacacggcggcggggggctcgctgcccgccaggtgctcggcctgcgacgcgaacatgccgagcgagcccttgcgcaccagcagcacgaagaagtacgagtgccacgtcttgcggtagaccttggagccctggccgtacgcgccctgcaggaactcgagcgtgcccaagtggatggccgcggacgacgcgagcaccgactcggaagaggtctcgccgttgtcggtgctgctgtcctggttcgtggcatcctcggacgcggagctctcgtccttggtcgggatcggcaccgtggcctcgcgcacttggtctccgctgctggtgagcgagctgcggcgcgcggcctcgccgatctcgtcgaagcaagtagcgcaaacgcgctggcgcttgcctgtcggaggctccgagaacacgcgcagcggcacggtgtgaggcgaacacacggcgcatacgaggtttaagcagcgacgacactataatacatgtgcatcccataggatagagtagagagagagagagagctccattagcaacaggcaaagccggaggatgtcattgaaccgtgactcacatggtgacggcggttgaggaaggtgaaggcctcgtgacacacggagcagctatcgctgcagtcgtcgggcgtccacgtgcgctgcaggacaagcaccgcacacaatgagacgaatgagtccggtatatcttccatctcatggcgcgttactcgagcttcctcaccagcagcgctccatcccaactcggaggcgactgccattgcggcagcacgtcctccacgatgcggatgtactcgcgctgagcttcctccggcgacatgtcgcccagcttctgccagagcttcctgcaacaccagcacccctcagcacagcattaaggtacatgtagagtctctctgtgttatccctacagcttggtgtcgtcaccagcgacaaactggcagcaggggaggcccagcacccccgtggcgttcttcttggggttgaactcctcgtacttcttggagccgcgcatggcgtcgcacgagcccacgagcgcctgctgcttgaaggcccacaggcggttagccgtgggctgctgctggaacacccagaggcgaggcgacaccgacatggggtccttctcgaggcgcgagagcaccacggccacgaagtgctcggcctgcaggaaggtttcctccgtggagctgccgcctgggggctgctccggcgccagcggcgtgtacacgcgaagcatgctcgctaaagctacgtgaggcgttggctgcactaacttcggggagacgaagccaagggctgagctaggcgaccctctaagatcgaggaactggctacagcacaataatacatgtaacactcgggcattccgcttcaacttgcacttggctgaactgctggttgtcagtgttttatctaaagctcgatcaactatggaggtcaaatgcattcctatattatagtgtagctcctcatgcagccttcgggtcgtagtccagcgcccacgcggcgaacgccgatgctgaagtggacatccgccggaacagcgtcttgggccgctccgtcacggcgtagacccggttgcctgcagctgcagcttgcgacgacgacgcagagcgcgactgcccgcgctccaagtcgctcgggaagtcgctgtcttcttcgtcatcgtagtcgtcctccacgcgggcgttggccattgcgtccaggttgtccttgttcttgctgtgcgcgtccggcacgaggatcaccaggtcttcttcgcggggcgtggtgtctttgtggcgggtcgacaatagcggcacgtgtcttgtgtcttgtcgtgccaatcggccggttgcagcgtgcaccggaccggaaggggacaacgctgaaggtgctggggccgaatgctctgaagacggagccacgctgtgaatgttgtagtctttctttcagtacacggaacgcccgtttgcgctgcagtttttcctcttctcgacgttgtagacgctgctctggtgagtcgaacacccacatggtctcaccctcgctgttcatgctgctgcccgaggtgtaccgattagtgaacgtacgggtatcctctggattttggtcgtcttcaggctctgaaggttggccttcatcggcctcactgtcatgtcttgggtgttcgtgtttgttgtgacggcgtagcttcatgaccgatcgagtgagcgcgtggaaaacttccgagatgttggagtcgtagtgtttctcgaacgcatccaccttaatcttgtcgttcagctccaggatcttcttctctcgaagattacataacttcatgttggtagtttctggtgaggagttgtcaccaccacctgagctgctatccgtgttgtccacagtcgaggttatcggtaggttctggtcagtctcgacttccctcttggaagtacggcgacgtgatagtagttcagtgaagctgcgatgaggtcgatcactttgtagcgcttcaaggcgcttcttctcctggtacgcgcgaagcttctccaccttctccatgtgcttctccgctcgctccacaatgacgtcccaccgttcgcgatgttgctccgaggtgtacggctcaaattgagcctcaacattgttctgcttcgccatgagaccatcaagaacatggataagttcccacttcggacccacacgctccactgcgagaataaggagctcgtcattgaagcagtcgcagtgcttgatacgttccgtgcagtgtggacacagatccttccacccccaagtttgaaggatgagatactaagcgaaatcctgcgcaacccccatgagcgacatgcgcaaaattgccgagagcacgccgtagtagatgaatttcttgaggaacaagcagctacgacgagcccagatgtagaaaatcagcgcttgagccaacgtaagcagcagcaccacgagcttgaagtaaaacgggacgaaaacccacctgcagccttcattcagaagtacttgcgtcgctgacggaatatcaacttgaagagttccttgaatatggccttgcctgctgaaggcaggaccgacgtcaacacagcgtacagcaccacagacgagaagatcgtcatgttggacccgtacgagtcgcgtatcatcacgataatgaacagcacgtagaacgtcacgtacagcgagcacactacgatcagtgcccgctcgccccgcgacagtctttcattccgatacgggcagaagacccacgtaaagtagttctcgtgcctccaccacgtgtagaatggttcaaaaggcggacgaaactacttccagcagcaagggccacacagtcgggtcttcggcaccttccggtcccaaggcattggctgccagtagtcgacctcctcttcaggcacgtttagttcgcgggcgtagatgcgctcaatgttcttctggaagctctcgcagtgaacgatcatcggaaacactcgcagcccgaacagcgtaatgaccaaatacgggagaaacagcagtagataagcaaccagacgagctgcaagccacgggcatcgggttcacggacaagtaggtcacgttgaagtgttccaaaacggccttcttcttcatctttttattctggtcgaagttgtagatcttctcgcttgaggaaacgctggtcggcaactgcgtggtgttgcagtagtcggctgtgggattccgctccaggtagcatggctgcacgacgaagtacattgtctcctcgatggtgttgtcaatgtacgtacgcggcagatacgcgtaggtcgttctcagctttgaagctgcttcaatgtacgcgaacggctcgccgtcgatataatgcgcgtactcgtactcgttgaagagcagggcgttgaagtaggaagtgttgggattcgcgttggggcttggattgggcgtctcgatggtgtaggtaaggtgaaagtccacttcctccaagaagtgaagatatgtgtagtcctctgtaacctgaacgtgctgtactgtgaaagcgtccagatgcagcacttcatttaactgtagtgacgagagcgaaatgcccagccaaagcagtacccccactccaatcagtagccacacccagaactgcgtgcagcctcgccgtttgctgtatctggtcccaataaacaacgtccagaagtgttgatgctccggcaccgttggccgcccctggacgatggtcgctccagttataccctctgcgtctgaaagggatccactgccctgcgaatcgagaaccttgtcgaacaacggagcgctcgagtcgacctggatatttggttcgtggccgaccgacctgcagtaggcgatgtacgcgtcaagcagctccatgtccaattcattatctccttcttcttcatcttcagccctggcaacgctgtttctgccaagtgagctccgtcggaagttctcctgtgtcacgccttgtagcgctgtagtcgtgagtctgcgtctccgtcgtcctcggttgcctctatcacttgtcgtttcattctcgtgaatcgaaggtagatcgttctcattgtcggtttgggcgtactcgataccatcaacgactcgccagcaacggatccgatcagaaaagtgaacgagtaaagctatgctcaggttgggagcaggtcatggtggatagtaagcatgacccgggaagaaccaatcatgggcaggagactccacgtctcaaacctttgaccgtcatatcgcgccgataagttgtacaggtaccatgtttgcgcttggcttgtggtcgagaaggatcacgaactggtcaagcgctcgctggctatggggtatgcagcaccgcgagtgtgacgcggggctgattggggcttctttccagtcgcgtcttggttgatggggaaacttttttttgctgattcacgtgttgtacatacagacaatcctctttggagtgatatcccgaatagggataccctctgattagcactaataaaggctctcccgatgaccaatggcatacaaacaggtttggtagtagtcagcagaatagtagcgatagtagtgataatatcactactactagtagtagagcatctcagtcgcgttgctccgttgagttgcttcgggggtcggcaccctgcagtggagtctccacttcaggccgacgtccccaccctctaattgatcttatcaatcaccattactattttttgtagtgtagtgaagcaaacttagggctaagggcgtgttcgcgaccgttgcaatttagagtctcagtttaacccgtgcaggtcatcaaaccaataagcaattagcaacactggtggagctgcatgatgaagtcttcatcatcagcaaataacgttactatctatcgcgaggtcaagataatcaacggcaattacacaccagcagcaagagagcactaatgatgctggactatatctcgcgaaaccctagatcacggttaaccgcaagggtgagctgtagcaccagcggttcaagatcaattagtggtagccgacagcccaaagcaaaatacatgtagcaagggataattgttgttaaaagctataatattcagtttcgattttccagcgtactcaatacagcatctcggctcccgatgcccgccgtacttcctctctagtgctacataccatatcacttataccatatcacttaccggtattaataacacaatttaaaaattgttacactatcgcaagattatctattctatcgacagcaagtggttgcgaggagcacagccaaagcaaacccgcgcggggtgcccgtgaagcatgtccgcgtaggagggcccagcaaccagcagggcagcgaacgaacccgtcgttgcggcttggagctagttccgtagtgtggggtgcgggcccccaaggtataaggagaccacctgcgtcactgccaggagctatctgtaggctacaggctgtagcttcacagagtatggacatggtgaactttgaatagcacgtatccatgcaggcaagttacccgccgaaccccagatgcagggcctttaaagtccccgggttgcgaatgcaaccgcaaatcggtgcatggctcaaacccgactcgaacacagagaatgcaatccaagaacgtctacaggccgagatggacactttagtgcgaagttcaatcggatggagggttggaaatactttggaattacgactatatggccctcttccgcctcagacatgggtgtggccggaagaaactgtggagttctggccaacatacctgtggacggaaaccccatggatccgagaacgcaacggaaacatgctaacacgtaagaaatatcctaggatacgcgtgtgtcctctggccgagctggaaattcggcggactggcctgacctcctactcgatgctaattccctcgccagaggcggaaaacaagcatcatacctacccgaagctaagcaagtgggcgttggctatactgttggggtctccaccacttgaaatcggggggccgaattcaagtgagcaaagcagcacatctacgacagccaccacggctagaacatcagtacaactggatggaacaagagcgtggtcaaataattgggaaacctcaggtggaggctgacgcagaaccctgccgcatcgtgatggaacaagccagggacgggctccattggcaaatatcaggtgacacagcggttccaaaggactatgaaaaggatctggccacgttccgcagattggaagcgcagaacaagatagtattcaaagcacaccccagcttgcatgcgtttccgtggtccataccacccaaagtgtcgaaccacaatataaaccaagcgttgaagaaactttcttttgcacgagcaaaaggagagctcgctccggcgctgaccaaagtcgtcaacagactcgaggcaagggcaaaacacgacgacgggctgtggcaggccttgcagcaaaccccgaaccaattgtggaggcaccgaaacgcgatcacagagtatcaagtctggatcaactacagattggcggtctcacagctaaatctatactttgacggacgacaaactgacaacagctgcaggaagctggcgagctgcaaagaacacaaggaaaccttagctcacatcttttgggaatgtccttgtgcgaatacgtactgggaagcgctagtaacgcgctggactgggcaacgctggcaacagcatgatctggctaagttcaaggcgaattgtatgtcaagatcgccgccgaaactgtcgtcggtgatgcaggctaggctgcaagcaaccttcacagacgaagtggaggcgtacgtgatcgagtggaaccgagtgtggtggatactcagttccatttgtataacggtcctgtggatccaaagaaaccgggtgacccatcagcaggagcaagttacgcagcaaggaagtaaacaagaatttttgaagactgggctgcagcaattgagggcactgacgcgacgcgaacgtcggcacccacacaccaaaatacaaggcacgcgcctgctcctctgtttaggaatgttggcgcgaccgcttcaagaggcaccaccgcaaggtgtgagtcaagtacaaccaccagatcgcacgatgacaccggcgttgatatcctggcttaggaaattccagacatcttgtaaacagtaaggttaaatagataagtctgatcctcctccatccatgcaggcaagttgaagtgcactctcttttagcaattctacccttcccagcactaactcactcgtagtaatgaatgcaagcgctgacttggcgctctaaatcagagtgaagccgaggacttggtggcgtttttttgcgctcggtgcgatctaaagtgtagcaatttatctaaacccgcgattcgcttcccgatgcctgtttgattagcgtttatcgtcgaggctaaatcgtgacccccactttaatggcatcgaccccttctcagaaggggtcactccagttttcatgcagttaagcgtgtctatggatcaagagagggttgttcaaccgaggttttttgcgcaatttttggccccggggaagtgattctagatgtaaaccctaaccgttcatgtctcagattaagagaggtaagaggtaagaaatagagtaaggaggagtgatagatgattataagtggggacttcgtccccagctactatatcactactatagcactggggtctgcgccttatagtagtgatatagctatagtagcgagaaaaaatgccactagtagtgatattagtagtgttaatatcactactactatcccgaacttcaacccacgtcagatcttcaaaaggcgcgaaaataggtggttctcagccctcccctccgcgcgctttgcgctctttggctcatttctcgatactcgggcggatgaacaagcagttaaagcgcgctaggagggctgccattggtggaaggaagcaaaaacttcatcgtgcagtttgtattcaccagtcgagtagtccgccgacctctgaaaacggtagggctgccagcacgcatcatcttgcttggctaatacttctaccagcaggttctgcagccacccgcgcctcagcaagtacttactgacagcgacgcaggagttaaagaagctaggagcagagtcactaacagtatccctgactacatcattcataacgcactcacgatcgatcgactcagtgtggagctcatctaacgacaaggccaaggcatgtacactatgcatgttgttttgctgtgtgtgaatccggtgctcactaccgtcctgactttagggatcattttcgggtggcatcgtgcggtggctgatcctggtgcgtgtctgaatttctgttttgctcaaagctgctgaatctcactgtatcgtttgcggtgatgtcctcgtcggcgttactggtcagctgcttaacttgctcgagtttagctggggcatggttgttcaacagtattcctaggttacttcgtgattggccactacgaacaaggattgaccttttacactgcggctttggcgtcgtaggtcgcgcgcgtggaggaaaacagcggcagaaatgggtacagtgtagatagtagtactatagtagtgatatagtagtgatatctactagtgacgttctctaactactaatagtagtattagtgctatcgagtctgagtcggatagtagtagtagtatcactactagccaaaattctcactactaccaaaccctgatagtgatgcctctggatcgtgattaaaagtggtctcccgaggctatcactacgaagaggatcgtctgtacagtaaacgtttcagtgctctactgctgtgctgtatcaactgatagtcgggggggggggggggtcaagtccaaacgtacagcatgcacttgaatcttccgctggtcgtcacgtgctcaccgcattgcgcaggaaagattagtgaaatcccctcaaacctgacgatataaaacactggatacacacgcactcgtaaatacctgggggtccacacccgaagaaactgcaagtgtatcatgcgtgcatttcgagatgtccagtggatattgcatggcactcgcagccggcatctttgatcagtgaagctgttcacgccaccgcgaaagtgtcacaacaccgtcccgttatacagcagcgcaccgccgcaaacagctcctgcggacatcatcgcccgtcgacaccacactagcatgctgtagccatcttccaagtgcgctcaagccattttgacacattttgctcggtacacttgaacccaaactgaaccaatcaagccggccgcataatcaacaaaatccgtccatttcattggtcaaaatcagtttccacgatcgctgattggctgtaaatgaaaattgattaccccgccgcgattacttacgtgaccgctgggagtcagcaagtcaagcgcccgatcgaagcagcaccgctgtagcatttgccaagttccccctcgatgccgtcgcccccgtcgtccgcgcggcggcgaggcgcgcagttcctcggggccgacgagttcgacgagctgcccgtgagccagcgcagcctggacgccctccccagcggcagcagcagcgtcagcagcgaccgacgacggcgacgacgccgagacacgagcaccgagctggagacgctctccagccacgagttccgacgccgagcggcctccgagtcggtcataccagacgcagagccctccagacagcagcggcagtcggtgactaaggagaactgcccgctgttcgaggacctgacgcggctggccgacaagaacgagcccgtgcacttcgacacgttccgagagagctcaatacgacgcaacagtcgagtgagtgaggcccttaatgagggcggtgaagctttagacgaggaaaaggtgtcggctgtcgacattagcgacgacgacgagcccggaaagctaaacacggagctgctggaggcgtatcttgcctactgcaagtccatcggccacgagccgaacatccaactgacagggggtgtaacgggggataaggacgatgaaggtcccaatgtggcagcggcgtatatatctgaacggccgtgtgtaccggagcggaagcacttttggacggactttataggcaccagatacagcaagcgacgaggttgcgtgcagttctggacgtggctgggtattggtgtgggcattgtcatttggctcggattctcgctctcatcgctgcatctgaatgaggtgctgcatctggacgcgttcacggtccagaacgtgcaggtcacgcaagactacacgtacctgcatttcctcgaagaggtcgactttcatctcacgtacaccatcgagacgccgagtccgagctccagtgcgaaccccaactcgtcgtattttaacgcgctgctgctcaacgaggacgagtacgagcactacgtggaaggcgagccgttcgagtacgttgaagaaggctccaagttgcggacgacgtacgcgcatttgccgcgcacatacatcgacaacacgatcaaggagaccatgtacttcgtcatccagccatgctacctcgagcgtgaccccacgggtgactactgccaaacggggcaactgccatcaagtgtgagctccgatgagaagatctacaacctggacaaggacaagaaaatgagcaaggaagctgcgtgggagcacttcaacgccacgtacatctcggttaacccgatgcccgtggcgtgcagttcgtctggaattgtcggtggtgcgtatttattgctgttcttaccatacgtgatcatcacgctgtttggactgcgagttttccagatgatcacgcattgcgagagcttccagaagaacatcgagcgcatctacgcccgcgaactaaacgtgcctgagaatgaggtggactattggcagccgatgccttgggatcggaaggtgcctaaaaccaggctgtgcgggccgtgctgctggaagaagttccgtcggccatttgagcccttttacacttggtggcggcacgagaactacttcacgtgggtcttttgcccataccggaacgagcaattgtcgcggggcgagcgggccctgatcgttgtgtgctcactgtacattacgttctacgtgctgttcatcatcgtgatgctgcgagactcgtggggtgcagacatcacgatcttcacgtctgtggtgctgtacgccatcatggtgtcggtgatgccttctgctggcaaagccattttcaaggagctgttcaagttgatcttccgccagcggcgcaagtacttccgagccaaggctgctggtggagatctaagcgggttttcgttccggctcgcgttcatcttgcagattctggtggttgtgctgcttacgttggcgcaggctccgatcttctacatctgggcattccgcagttgcctcttccttaagcagtttatctactacggcgtgctagcagcgatcgcgcgcatgtcgctcatggggttagttcaggactttgtgtggtacctgatcatcaagacctgggggtggaaggacctgtgtccgtactgcacggagcgtatcaagcactgcgactgcttcaatgatgaagtgctggtgctcgcagttcaacacgttgggcccaagtgggagctcattcacctcctcgatggacttctcgcgagacagaataattatgaaccgcagtttgagctctacacgtccgagcaactgcgcgagcgctgggatgtaatcgtggagcgagccgaggcccacatggagaaggtcgagaaactgcgcgcgtaccgagagaagaagcgtcaagacgcattgcgtcatgaccgtattcgacgcagctttgcgagctttatgtcgttccaaggcacagcgcaggcggttcaccccgacaccgaccaagtcgacgatggcgccaccaaaggccgtaagatctccgatgccagcgatcatgaagaagacccagatcatgatcagttggagcacatgtgcaacatgcgtgagaagaagattttgtcactgaacagcaagattcagctggacgagttcgagaagcactacgactccaacatctcggacgtcttccacgcactcgcacgctccgttaccaagcgtcgtcgtcacgagaagcacgagcattccagacacgacaacgaaggagatgaggacaaagcggacgaagacaaacggaccacgcttacaacgcgccagagcagcagcgactcgagtagcagcgacggcgagaccatgtgggtattcgacacaccggcgcagcgtctcgagcgccgtgaggaggagaagctgcaacgcaaacgggcgttccgcgtgttaaaggactacaacattcacagcgtggctccgtcttcagagcattcggccccagcaccttcagcgttgtccccttccggtccggtgcacgctgcaaccggccgattggcacgacaagacacaagacacgtgccgctattgtcgacccgccacaaagacaccacgccccgcgaagaagacctggtgatcctcgtgccggacgcgcacagcaagaacaagaacaacctggacgcaatggccaacgcccgcgtggaggacgactacgatgacgaagaagacagcgacttcccgagcgacttggagcgcgggcagtcgcgctctgcgtcgtcgtcgcaagctgcagctgcaggcaaccgggtctacgccgtgacggagcggcccaagacgctgttccggcggatgtccacttcagcatcggcgttcgctgcgtgggcgctggactacgacccgaaggctgcatgaggagctacggatcatagaggactgtattctctttcgctgcctggacacatgttatcccaagcaaatactacgtagtttccaacgcattgagtggactcttgatcagcctagctgatgttgtggcactcaagattcttgagtcaagaatgacgcgacgcggcatcaacatgcgtcgaaagtgtatgtcgctcgaggtgcgtacatatatgaaatagctcggcacctttgcaacagtggtcatatcactgcaacgtgcgattaaccagaatgacactcaacgtcctcagacacggtgggcgcctccgtagccagcattttggtccagcacgtcgctgcacgctgcgagcatccgctgtatccgggatctcaggcaccagagaatccgatctcgccaccgaacagatcagatcatgtatccgcggcccagctgcgggcgatcacctctgccagtccacgactgcagttgcaattgttggcaaaacctgcagtccaaacttccgagctgtacagtggcaagtgcggatttgtcgattggcgaaaagagctgcaattccggtagccatttcgagatcaggttgtcagacgtgatgcacaccagcgctcttgcgatgctaccgctgcaaggcgcagcgctctagggcgacgcagcctgccctgggatcttgtagcacgagctcattcgtctgagcaaggcgatccaacctacatgcattcgattgcccttttgtcgcaggggacgcgtccgacctacacttggcacgtcaacacaaaatcgtctcgcaatcgtcccgcaatcgattgttctggaaaatcaacgcacgctgcaggccccggcagcaaggagagaactaataggagggtggctgtggctgcagagctcggcgatcgagtcgatgcatcgatgcggggcagacctagctagacgatcgtcgggatgtgagtctcaaatggcccgtcccagaaagaaagttctggcgtaatctaccgtcaatacaaacttcaagtcatttcggacgtaatcgcgacttttcatcacggttccgaacagattttgattggctggatggggagcgtactgtaaaatttcgatacgcacacccgtctctgcaccgcgcatcacttggattcggtatgtacatacgaaattcaagtcaacattcagcgacgatggcagaggaggccaacgtcgtacagaattaggttgtagcgcctcaatgagggggttggaaggtttgagtgttgggaacgatgtagtgctcaagcaagcgtaagctgtacggcaaacgctgacttctgccagctagctagtcagcgtatactacaatggcgctagcagtagcatgagccgcaagcaagacgcgttgaagcgcgttaccgagctttctccgaggaagagctgcgggtacgaacgctactggtaagatgtccaaacagcagtgcgtctaccaaagcaagaacgcaatatattatgtctgtgcatgcatcatttccgtagtaggacacgtttgtcggtttaaggctcgattggcagctacagtctagcccaaccgttttgtggctaatgcttctcgggcccaaacaatgtcactcgagttgtcgcctacataccacacaccggtagatgcagttacttagtaactcctttattccggcacttgaagtttatatatggcaatgtgcctatttgaagttttttcgagtgccgaaataagcgaccgttcaaaatcgcagaattcaagcagtgaacgatggagaagctaaagccaagcgtctataagaagcccccctcgcgtaaaaccccgttccaagacgctcacaagctgcagtacggactcgaggtcgtagcgtgtgacgctgggggagcggcttgctcggtccgctgcctgttttgccgatattttggtagagaggaagcacccaagggcagacgaaagcgtactcaaaatatcaagtactacaaggctcctttcaaggctcctttccgaccccagaactacatcgagcacaatacttccgcgcactcagctaagtggggagaatacacacgtctcagggacgcagagaaggctgtattttttgctgatctcacttctcgaagcaaccaattggtagctcattttgacacagagagtgctgtgttgcggttttcttttccagagttgattgtgactgagctgattggaaaggtatttttcaatgctgaagatgaagatgatgatatgactgttgcgagggctcttcgtgctttcggctcggtagtggatggggtctacacagtggaaattaagacgcctctgcggtttactctttcggtcaaacatctctcggttgggttgtcgtttcggcagacggcagcagtaattcagcagcactacaacgccacagggaactcgaagctttacggtatgaccgacgctatggcaggcacttatgctcgtattctagttgcctattcgtttcaacgcatcagcaacctcatcgcagaccccaatatgtgggggattgcatttgcttgcgacatcacaacccacaccgatcgctctttcatggatcagcgtgttcgtgttgccgtcaacggcgtctacacttgctcgcggtccctatgtttgaccgccacactgctgtggtccaagttcacctgattgtttgagtactcgatattttgttcgctaactggagacagaagttggttggtatttcatcggatggagagaacactatgacaggccgtcatggtggggtggtcactcttttagagaaagaggccacccactcggtgctgagagtgtggtgtgctgctcatcagatggacctggtcatgaaagccggttttgccattgttgggaatggagactttgtgaagaatacaaaggatttaattgttcaccttcgccgccaaaaaacgctgattactgaaatgggaggtgccgccaaaaaactaactaatcggtggctgtacatgggaaacgcattgcagtggatattaaaaaaccattttcgcctcgaagaacaccttgatgaaaacgtgtctgcggcaccaacgccatcatggtgggtcaatgcagctgttgtttgtgggataacggtggtggtgaacgtcacgtttgtcaagatacaggggaaggatgtcctgctctcgcagcaaatggcagagattgagctccttgtagatcgccttcgcaaactgctacgagttgaacgcgtacctagctctgaattccaatctagcgctaatgacacgatttctacgaagtactggctcaaagagcaacacttgctcgagtttattcaagaccaggggacgttcgtcaagaatcacatgaatagtgttgcagatgccgacaaaaattcgattctgaggcagcttggcaagtttgtactgcatctaattgaaggtatggagcatgtacaagctgagcgagacagcaacaatgacgctgccgcatctccggctccgccagtaatgccagctgagcttgtcacagtacctcctcgccagtttgcaggagatattttgaatcctcgccgcgatcaattggctttgttttggagtgaggcaaaaattgaagcggttgaacgggagcatcgagagctgtgtcaagccaatctgcttgatgagatggttcgcacagccctggaggaagaatcgtatgagaccagcttcaacgacgcctgggattcagtgcaaaacgctgctgctccaaatacattttcacatctccgtgcggattggcaaccgtattcgcaaatacggcgtccgtcgaatccgattttccgtattgaagtgtgaactgaacgaccgacttcgttgacttctctagcccttgaaggcatcttccaggctaaacagttcgatatgctagagaaattgtagtaaattgcatactttatttccttaaactggcactgtgccgaaataaacaaaacaagagtgccgaaatatagctaatccgacacatcccggcaggtgccagtataagggaggtctgagttactacacacagcaaactggagatccattgcaccactcaagggcacgctacggtaagaccgcagccagagcgacgcctttcaatagagtattcacgaacatgtgcgtcgcctggtgcctccttattcgtcggtaatgcctcagatgtgcgaggttctgaggttctggtatagaggcccacaatcacctcatccttcggaatcgagccactcttcagacacctaaccgaaatgttgcctcgattacgcgcgtcacttcccaacagtagccgggacgtgcgcaacacgctcgctccagggccacagactcaatgccgtcgtcggctccgccgtccccggacgcgattgccgcagcgaacgcagcggcggcggcatcggcgcgtcctgcgcctgcaagttccgagtcgaacgagcctccgagcgccttccgacgcgctccggaagcctcgcaatgctcggaactcgactggtgcagcgcgcgcagcaacccgagcgtcagcagcttcaacagcttcaacagcagcacgcgcgagatgcaccggcgcgccgtggccagcgccttcttcggtccagtgtcgggtaccaccgaggtgatcgaggagacggacgaaagctccgagccgccggtctgccagcgcagcgtcagtagcgacagaggcagcagacggagacgacgtatgggcagcggggaggggctgctccgacgggtatttcggcacagaacggcgtccgagtcggcgctgacaaccacagcagacggaggagaagaggaggaggaggaggagagggaagcgcagacgcagaagcggacgttgaggcagcagttgtcgctgccgctggactcgcccaatagagagaacgagacgcccgaggagcgcgcgagacgcagagagaacaggacgttgtttgaggagctggtgcatctagccaacacacggcaaccagtgcaattcgacgcgttcaagctgaggaggaatagtagcagggcgagaagcagcagaggcatgtcgctgagtgctcaattgaggcggtcgggctcggctgaggcgcacgacattgcggactttagctcggatgaggaggaagaggaacagggcagtgatagcgacacaggtgtggacgacgagaccatcaacacggagctcttggaggcgtacattgcctactccaagtccatcggccacgagcccaacatccagctgaacccggccatgatccctctcggagcagaccggaagtctcgagacagtcacgtggataaggacgacaatggctgggacgaagacggcgagaacattactcagcgcgcgtcctttatccaggaacggccgacgctgaaagagcaccagcacttctggacggggtttctaggaacgaggtacagcaagcgccgcggttgcgtgcagttctggacgtggctactgattggagtgggcgtgctgctgtggctgggcatctcgctgtcctctttacagctgaacgaggtcctgcacttggacgccttcacggttcaagacgttcagatcacggaggactttacgtacttgcacttcttggaggaggtggacttccacctgacctacaccatcgagacgcccagtccgagctccagtgaaaaccccaacgcaacctacttcaatgcgctcctactcaacgagtatgagttcgagcactacgtcgatggtgagccgttcaagtacattgctgcggggtcaacgttccgtaccacgtacgcgtacttgccgcatacgtacattgacaacaccatcaaggagacaatgtacttcgtcatgcagccatgctacctggagcgcaacccgacagccgactattgtaacaccgagcagttgcctaccagtgtcgaatccagcgagaaggtctacaatctcgatcagaagaagaagatgcagaagaaggctgtgtgggagcacttcaacgtgacctacttgtctgtgaaccccatgccagtggcctgcagttcgtccggttggctcggtggcagctacttactgctgtttctcccgtatctgatcattactctcttcggactgcgcatcttccaaatggtggtgcactgtgagagctggcagaagaacctcgagcgcatctactctcgtgagctgaatgtgccagagaatgaagtggactactggcagccaatgccatgggatcgcaaggtgccgaagacaaagctgtgtggtccgtgctgctggaagaagttccgtcggccttttgagccgttctacacgtggtggcggcacgagaactacttcacgtggatcttttgcccgtatcgaaatgaacgactgtcaaggggagagcgggctctgatcgtggtgtgctcgctgtacattacgttttacgtgctgttcatcatcgtgatgctgcgagactcgtggggtgcagacatcacgatctttacgtctgtggtgctatacgccatcctgatctctatcctcccgtccgcgggtaaagctgtattcaaggagctgttcaagttgatattccgtcagcgacgcaagtacttccgtgccaaggctggtggtggtgatctcaaggggttttcctttcggttggccttcctactccagttccttgtagtagtactgctcacgctagcccaagctccgatcttctacatctgggcgtttcgcagttgtttgtttctgaagaagttcatgtggttcggtgtgctagctgcgatcatgcggatgtcgctcatgggtttggtgcaggacttcgcgtggtacctgatcatcaagacgtgggggtggaaggacttgtgtccgtactgcacggagcgtatcaagcactgcgactgcttcaacgacgagttgttggtgcttgctgttgagcgcgtgggtcccaagtgggagctcattcgagttctcgacgacctcatggccaagcagcaccactacgatccacagttcgcactctacacgtcggagcagctccgcgagcgctgggacgtcctcgtcgagcgagctgaaaagcacatggagaagatcgagaagcttcgagcgtatcaggagaagaagcggcttgatgctctgcgtcacgagcgtgtgcgccgtagcctgacgagcttcttgtcgttccgaggcacgacgcactcaggccagccaggatcagggaaacaggtgaacggagacgaggacgaagcaacggagcgcaagtcgtcagaggccgacagcacgagcagcagcaccgaagagacccgcaaccgcgagtcggacgtagacatccacgtgtgcagtctccgcgagaagaagattctggagctgaacaacaagatcaagctggacacgttcgagaagcactacgactccaacatctcggaggtcttccactcgctcacgctctcggtgcagaagctgcgtcgccacggcaagcgcaaacacaagtccaagtccaagtcgaagagcgccaatctcgagaaaattccagaagaaggtgcggacagcgacagtgagcacgaaatttcaaggtccaggacgcagttgggctctcgtagcagcgacggtgagaccatgtgggtcttcgacactccggcacagcgtctcgagcgccgtgaagaggagaaattgcagcgcaaacgcgccttccgcgtcttgaacgactataagatcgagtcggtggccaaccccgagccaagcacgcccacggctccgatgctgtctccaattatgtcgcgacaaggctcaatgtcggcaatctcaactggagcgccgctgtccacaagccgagtgagtcaacaagactccaagaagaggccgctgctatcgacgcgcaacaaacaaccgtcacctcgaagcgaggacctggtgatcctcatgtcggatgaacccaaggccaaagccaaggagaaggtcaatctggacgagatggcgtctggatgcgttgcagacgactatgacgacgataacgacgacgaatacccgagcgacttggagcgtggaacccgcgctcccctttccggtgctccagaccaacctcctaccagcacctcgcgcgtctactccgtcacggagcggccgcagacgctcttccgaaaagtgtccgcgtccgcatcagctttcgcagcgtgggctctcaactacgaccccaacgtcaagtactaaggtcgtggcactaatttatgcagaccgagatccttgctctgccaacagtgtgaatagacgaagttatccatcattccatgcaggctcttgccaaaccgctatcaccaagttaatgtgaactccaaccgtagtggtacaaagatctctgttccgccactttcgtccaatctgcacctccaatcgttgatcaaccgagacgcctgatattacatcacctgcagacatcatatcaacgtgcacccctctaacacgcaacatgaaccacaagacaggtgctgttttcctcttcatccgaaatccacggatgcgctcttcttccattatccacaatcgttaaccctgctacgagaaccgaagccaacgcttgaagctgatgatggtcgtcctgcttacagcggagacgaagagaaaactgctggttgctgcggttgatcttggggcacgggccacccgtcaaagcacgttgcttacagtctgtcttggaatgatggcacctcgagtgctgatggcacactagctgtcaccgacagtctgtggcacgacgcttatctggcgcgctggcgcatttttcggcgcttgcggcgaaggcggcgcatacgtttcttgcgccacttggcacgcatgccaccgttcacgtccagcagcatcttgagcgtgtcgcactcgccgacggcgtagtcagcgagcgagccgctcgtcagctgcttgccggcgcagaccagacggaagttctggatgtactccacgtcctccacggcctgcttgaccgacgccaccgaggcgtccgccgccacgctaagcgtgagcggggagcccgacagggtctccacgaagagctgcattcttccctcctggatgctcagatgctagcgtcaccgaacgaattaaaactatagtaagtaaagactgtcgatgtagccatgtggggccaatagctgcgaggctcagagagagacaagggggtcgccacttaccccgaacgatgttccaagcagagcagtcagcagaaagtgaggcttgttgctgtcggcgagcgcagccttgggatcaacatgcgagaggatagttggctgcgagcttgccagcgtggagagacttggttattgtaggcaacaagtcccgcatgaagggcgttgtatggtgcaaaaaagaggagatggaatcttcaaacactttgattggctggacagcgggcgcggactactggccaaccaaaatgtgaccccacttgagtgacactttccccactatagtgtcttcaacttgcactgcaagtgaagttgttcttgttattgcactcgttcttacgttatggctagtacgcgcagatgcagagcctcctcggtggtattgcacgccaacgaacctccattctctgcgacataaggctgtggcagtgcgcccaggaactcgtagagaatggtcaactgcgccgtcaccactcccgtgttcgagtcttccgtcgtgacgagggccgacttcaccgtcgccacattcgacagcgcagtgcggtacatctccatcagcatcgtgtccagttgggctgtcacttccgtcgcgttcgccgtgaagtcctcgacaaaactgtacgcccagttgccgagctcgaagctgacgctggcgaatccgctcgccaggtcgaaggtcaagatctgctctccaggactgtagtccagcacgatctgcctccctattgtggtgctgtatgccagtggacagctcttcgcccacagacaagcgtagctggactcgagcagctcacgcactgtactcgaccattccgtgccgtccgatggactcaagcagtcctgcagcagccaagttgcatcaacgctgctgtcgatatcgtccttctccagcatcgtagctatcagtgtcaagtctgcctcaagcagaacacccatacacgctgagaacgctcggcactcgggcgagctgctgcaatcctccaataacgtcgtgcactcgctgcaagttggggctacatcatccagttgtgaacctgaatacagtccaccaagtcgaggctgctccaaatccaatgttatggtgataccagtgacttcgtctccatcgtcgatcagatcaggaatctcagaggtgataaatgctggttcaggctggccagtggtgtctaccaccgcgaggtcgccaaactgccgacgtcgcacaatggggatgacagttgggtcgtcaggaacaaactccaggtctatggtgaagggtgtggtagtggtcatatcttgcatcgagtttacagcttcgaacgtgagacggaagctctgggcattgccgcttgatgacgacccgcccacgaagaaggaccacgaagtatccccaccgagactctgagcaccaaccagcacccacggagccggataagtagaagttgaaccagcaacacttgatccgggaggaagaccaattgacgaagatagtgcagcgtgaatgctctgcagtttacgaagaaatattggagccaactgatcggcgcctgtgaaccggagcttgatacacagtccagaagtggtggaagagcacacgtcatcagcatctaccaatgctccagatgatgccgtcgactcagggttatcgaagccgtagataaaacttgtttgatgttccagcaatgattccgacgaggtaatgaagccgtcgctgaccatgtctatctctggtacgggatctaacagtccaggcaaatattgcggccaaacgggtgatccatcggcgtggacgtccatctctcgctcaatcagctcgaggctgccgagtgaatacaaagaaatcgtggaagcgagttgctgcgaggaaatgacggaacgaatgccgtagcgttggctctcgtcggagatgaacgccagatatttgacgtaaagtaagcgagaccacacgatcccaaccccatctgaagttttgtccaggaggtcctcaacactcgacgaaacgagaaataaactatcgtccaaaatcgcaacttgttgcagcaagagtgccagggtacaacgaacttgatggagctggaagaaattcggcgactccaggactgtaccggacgcatccagcggctcgactttgatcgtaagcgtgaacgaaacgtagggctccaccacatctgcacctgaatcgacccagtcactcgcactttggaacgtcacgctcctatctgtcgtcgctgtaaatcctagcgcagccagcagaccagtttcaacgtcgctctgtgtcgcaacaacatgatcggagagtgtcacgctgtcgaaagcgcctgaagttttaggctccaccttgaagctcagcgtccatttgatggtgttaatgggatcaaacaccgagtcggatgcaagcgcgctattgtcgccatcgttgtgagtgccaagggccgacagcgtgaatgaatctgagggataagtgatccctccgaatcgtaccgaactcggagctatctgcgatactgtagtccgtacaaacccaagaacagaccacttcactcgttccaactgcgcgaaggtgatgttgtacagctcgaaagataactcaattgggggttcagagtctccgctattcccagtgtccacccacgtgctcgctccggccggtaaggagaaaagttctcctgcctctttgtccacatccatggctactagtcgccaatccggctccagcacattgaaagcattcgcaacaacgctgctcaaggttgagttctcttcaccgagcagataggtttccaccgaatcggcgtaaaggatgtcgtggacatgaatctcaacgttcaggacgcctgcgtcagcgtagtacgtctcataaggcagcagctctgtcggtgagtgcacaataatgtccgatgcgcggacttgtagagactccagtcgttgcgtgagtagaaatcgcagacgtagatcctggaatgcatctcggtccttcgtgtagtgttcaatcgcgctggtgtttatccccattgtgactgaaactgtagatgcaatggcgagttgaacgcccacccacggcttcaggtacaactgagcaaaggactcaccctcgagcgccatatcaaccagggtcatcgcaataccaaacagcgtaatgctgtctacggtagcgttaacggagttcacgatgttcccatacttcaaattcttggcaatgcgctcgcgttcagcgttgacagacggcagcatcgaggctgaagcgtccgaggtgtagccattcccactgctaccgagaggaggaggcaacgcagatatccccaacgccacgtagtacgtctgctgttcctcctccgagcacgcttcggtctgcagatactcgagctgcactcgttcgattggctccacccccgcgatctcctggatccgttggcggaaaatggcttctccagccaggaagtcgttcatcgagatcttggtcccaaccagaacctttgctctcacacggggtcctgtgcgatacatcctcgaaaatgccgccgcatcggtctgagtggatgtgtagacttcctcccactcgctccacgttaacgtcctgtagtcaatcgatgggcttgcagctaccagaattggagacgtgaacagaaccagcagcaataccaaaacctttacgccgagctttgatagatgtcgagctctccgctcacattgatcgtgttctacgttgccatcaaccagaacactggttgtaccgggcccgcagctaaccgaaaggtaccttggacgcttgcagacgctggtggagtgccgttttgcgccgcttgccatggtactgaaggaatgtgaacgtcgtgactggcaaaagtgcaagtgtatctcggatcgcgtcgcttcatgctgcaacagcaacggttgcacaccgtccgttttgcatgcggaatctattatttagcgcttaggcgcttgcattgagcagtcgatcgaacttggcctcgagctgctgctctggagagaggatgccttgtcgttccagctccttcttgcgctcgcgttccttggcgttcaacgctgcgatgcgtcgctggttgcgagtgttcagatcctctcgtacggctcgtttcatgcgcttgaacagctcgggcactgaatacgcgtggaggtagcgcagcgggtctgacttgggagcgtagtgctcgcccaacacgttgcgtcctaaagaaaaaaatacacaaaaggcagcgcactgtcaatgagagagagatacttgaaaagtaacagagctgacagggacgcacccaaaacttgagcgacgccgtggatgtcacgacggaactccaacggatcctcttcgagcgcagtgatctgaagatgcttgggcagcgagacgcccgtgagctctcggacctgtgagagtctcagagtctccagctgtctttccagtcgttcttgagtctctactcgtgatgttgagcgtagcagtctcttcaggtcagcctggacgcgtagtgggcttcgttggggcgccaccaacgtctcctcttcctcctcattaccttcgtgtttagccttctgttgagacttgtgcttggacgcagctctgtgcagactgaattcatcagccgcctgaagcacgcgctcgtaggggtggacgtctctctcgacctggtagatcgtccacacactatcgacgtcctcggccgccttctccacggctgcgaccatgcacagcagcgtgtagggagcctctcgcacgtctccatcgctccgaatcgctgcgtccagcagcagcggagacgccatcgtccagttcagcttcactcgtcactctctctctgtagacagacttagggacgcgtaaccaacgcctgatagcgctgcaaacgctggaagcttcaatccatgtcgacagcatctcgctgggctgaagttgccgtcaacttcaacatgcactaccgaaattcgagtcagtcagcgcgtgaacgaccacactgcaagtcgccactgacgtgtccagtcaacaatgctcgaggatcgcaatgactgcacccatgtaataactgttgagacgaattgacgggggtctactaaaatgccacagcacatatatttcgtaatgcaacacgttgactgggcctggcgttcttggctcgggcggcgagtgggtggggaggcgtatagatacttttacggtccatggcgagctgcatgttgcccccctcactcccgccccgcgcggccccgagccaccacttaaaacgagcagcttcttccacttctctcttcttcttcttgatcaaatcaaatctgtcgcgtcggctattacacgcgcttgggccggcggcttccgttcgccgcattccgctgctgctgctccttcttgagccgcacctgctcaaagcgcttctcgaggttggtcatggactggcccagcgactcgagctggttcgagtgctcgcccagcgtctcgaacatgacgccctgctgcgccgcgagctgctgctgggtctcggtcgtgcgcgccagcaggttcatgagcatggagcccatgttgcccagtcctccctgtccctgtccctgcgcctcgatggcggtgctagtcgcagcctgcgcggcctgcacgatggctccactgtcggcagtagcagcggcaacgggctcaggcttgacgggcgccgggggcggctgctgttcccgcatggccgtctcgcccgcgggctgctcggtgctcccctgtgatgtgggcggcgacacggttttccgcgcgggcggcgcggcgctggaccgcgagctggtggacgaggtggaggaggagagcggggcgggctccggcagcgagccgccgttggccgccgccatgttcttgagccgctcgtccatgtacttgagcaccttggcggcgatcttgtgcaggatcttggcgtccacgttgtggtggctcttgacgtcgaagacgaagacagagccgatgcagaagccgttgggtgtcgtgatgggcacgcccgcgtagaagcgcacggccgaggcgcgcgtgacgagcgggttgtgctggaagcgctcgtccagcgacgtgtcctccaccacgagcgcgcgcttggcgtgcatgatggtgtgcgcgcagagcgcgacgtcgcgcgggatctggcgctgcgtgaggccgctgttggccttgaaccactgcttctgcttgtcgatgaagctcacggccgcgatggggcacttcatctccttgcacgcgatgcggcagagcttgtcgaacttctcgtcgggctccgagtccaggatgcggtagcgcgcgagctcggccaggcgcgcgtcctcgttcttgggcgtcggcgcgcgcggccacgggtgcttccagtcgaagttgagcgcgtagccgtacttggaggagctgctgtgtgtggtggaggtcattcttgcttgctgtatactacgtacagtagtattgctttggctgcagaacacgcgcgcactaggctctgggcactaaggcactggcaactggcagcgagcgagtgcactgcgggactttggaatgtgaaggcgcagcgctatgcggtcgaggacgccgcagcagacagcgtcgggacggccctgccacaaccccgcggagggaagggaagacgacgcgacgactggtccggaaattcgcatttagggggatgagtgcgccgagacgccagccaatgggcggcgccgaaatgcattcagttcgagttcagcagcaggccacttcaacacggacagaccgtgcccaatgccatggagtcgctcgacttggacagccccgtgacccgtggccggaggtgtcttcgccccgcgcatactgggcgccagtctaatggccgcgatgcgacgcgcgtggcgtgacaggggcggattgtcgaatcgatcgccaaagatacgcggcacttgtcaggcaacgagttataagacaccccgaaccggaacccaggggggaatatccacctttgacggggcggctaacaacatgtacacactgcagcaatgtttgccgctgctggcccacggcccccatgctgctctgatcccagctgcccattttgccgtgctgtcggtgagtaataccggccacttggcagcgcgctgccccataataactttgcctcaccgcccgaaaggcccctgggctgtcagcgcggggcggccccgcactctgcacgatgggggctcttcctcttcttcgcggcgtcgcgcggccggctcctgtggtggctgatcgtcgtgtcaaacattcaaaatattcggcgcattaatgcgctgtccgcctatctcggcgcggcgtacatgtagcttcctgtagtcgacgacggcgccctcgacgatgctaagcgagttgcacgccgagcgtaacgcgcgaaaccaggtggacggggccgacgctgcagcaaaactggcgtcccccagaccgaagtggccgaagagttgaccacccgcgctcaacaactcggcaaacagattgtgcgtaagcatcaagcggcaaccgccagccgctcggaagctcgaaggcaccgcctgacagcttcaagttgtgccgtttcgagcaggcagttaatagttcgtgagtcatgccgtatgcatcccgcacgctgttatacaacagtcaccgtccacaaagatggctagcaccacaaaggccctacgctccacagttatcggctgatgcaccacctgcaggctggctcgttcaagctggaaagctcgtcagcgttgacccacacaaacttacaacttagtgtgtagtacacgacaaacgtgtgaccacataaaatggagtggtccacaccactaatatatgaggcgtaatcacgtgggagaatgacgcgccacgtcagtacagtcgacgtcaaccccctcaaaaaaggaaggaatcagagccgcacacttcccgatatccatggggaacgccaacacgcgcctgctgcagcgccactcgcgactcgccctagcgttgctgctgctgtacattggccgcaagctgctcggccgctccattgcatcgatcttcatgcgctggcacctgctgcgcgccgccgagacgccgcgactcgtgtaccgctccacggacggcaacaagaagctgctggcgcactgccccaccatcagtaagcgcgcagcaattgcaattgcacttccaattgcaattatacaggagtggctaatctattgtctctgttgcgttttgccagcgaaacacaagtactacccgccgtggcgtctgttcaatggccacctgcagaccgtgcgcttcgcctacgacgagcgcggccccgagatcaactacaagcgccagttgctgaggttgcctgacggtggcgtcgtgtcgttggattgggcgcttctgcacgcccaggacgcaccggcgcaggttggagacctcaacaagtcggtctcggcgtcgtcgacgtggctgcccgatgtggagcccgcgcgacgcacggtgatattgttgcctggacttacgggcggcagcccagagaactacatccgcagtacgattgctcgccttcatgagcttggttggcagtgtgtggtattgaatgctcgagggtgcgccaacacccccgtgaaaactgcgcagctgttctgtagcgcgtacaccggcgacctgcgctttgtgctgcagcaactgagcgagaagtacgagtttgcgaaggaggcgttcgttggagtgggcttttcgatgggatccaatgtattggttaagtatttgggagaagagggagacaaagctcctctaactggcgcggtctcggtcggaaacccgttcgacttggcgatctgctcggcgaacttcggtggctcgctgtttaaccgcatgacgtacgataaggccctcaactcgaacctccgcgagctcttcttcaacaaggtacggacattaacacgggatgaatgtgtggttattgtttgctaacttataattatcgttgcgttgacagtgtaatgcagcagagcactttgtcgatttccctggcgtggacctagaggctatcaaggccagtcgcactgtccgagactttgacgatacgttgaccaagtacgtgttccactacaacactgtggacgattattacaacgatgctggttccgtcaagaagctaggcgacgtgcgcgtgccgttgctgtgcatcaatgcggaggacgaccccatcagcatcagctcagctttgccgaaggacgacgaggtgaggtccaacccgaacgtgatcctgtgcacaaccaagtcgggcggtcacttggcgttctatgagagctctctcagggaccacgccgagcaagaaaataacaagtcgcagagcaaaaagcagtcgaacatgtggactgtgaaccccatcgccgagttcgcggaggctgttcggctgaacaaggtggaaaatgtgtaatcgcctatggttttacttgtcttccgtttatattcccggtggctagctagcatgggaaagtagaacatcgagcggcacacattattccaacgtatcgatagtgaatggtcgggtacactttcttctttagggcgtaggcatgcaaataaggggacaaaaagcttccccacaagatggcccacaggtaagggagctttactgctgcgtcgacagttgtgcccaggagctggtgggtctggagagggcaggcctgaatgattgattactccgtagaacgaaacaggctggaaaacagatccaaacatttgctgtatcttactaataaaatacttaacttactagaaaaatgcacttgagtatgttggaggtataagctcattgggtatcacactaataagctacgacttgttactttttcagaagtgaaagacacgatacttatttatatttacaaatcgcgcgatccatgttgaccaaagattttacttactataataggcgatcaatgatggccaatctgactataaccatttattttttagtagtacttaagtatgtggttatgacaaatacggtagcatgtgatggtaaaatcgcgcaatcagtgctgacttattttattttacacaattgtttggcattgaggcttggttgaaaaagttgctggtgccttttgataagatttttacggactggcaaattgccggcggcaatgcatgtatacagacaggccctgtgctgcacggtggccaaccgtagggattgatgaacgtgccaaaacactttgccattctgacttcagtgttcgattatgtacagaggaagtcggcaagcgccatcaacgtgaacttattacatgttatcacaagcaattcactcaaggaaaacagtgatcgcgaaagtagtaagcgtgcgagcaggaacttcaaacatcactgcgaaaccttacgcaacaacaagagatcgcacaacaatacgcaaaaacttaaactgaggacttgcacagctacacatgatagaacgctcttgccactcgccaacagaaaacttaaaaaaataactagagaagctcaactaaacatcggtaggtgcatgcaagttaagttgggtgtctttgtgcaacgaggtggccgtggcgctggtcgtagccgtagtacttgttgaactgcgaggggtcaactccaaaatactgtcgttcgggacggctgcgccagttaaaatagtcgggtacgtgacgagcgtccactccttactctcggacgatacgaagaccggcaacgacccagcccaatgtccgtaggaaatcgtccacgcgaatttcgtcgcgccagtgcttgtagtcgtgctgtcgactgcaacttgagccacttggatatcatcgtactaaatgaggccacgcagtcatacatcgtcatcgtcagtgaacaggtacagtactgcgaagccttctgttagtcattctgcaaacagaacgtgcacttggagtgagttgctgccagagcgaactggatggcggactctctgcgtaggggcatgattcgttggtcccagcttgtcggtatgaacttgcctaaatccaacaacttgtcatcaacataaaaagctggagcaccagcacgtgcatttgagtccgatcgacaagccacgaggctacgacgcgcttcacgatctccacaacaacgagaaaacagtgatcgggaaggtatcgagcgcatgaactagagctccacaaaactctttgcaagaattcgagactgcccgccaatacaacaaaaacagaggaatagcccagcggaaatctcttacccgctcataacaacaacactcagacaatttgtttattgcggcgcaaagaaaacaaccgttgttgatgatccttacgcacaaacaccaggcattcggggaaatcgagacaccacttattcaatgcgtggtgaccaaggccgtaagcatctaccagtatgctaccggtccgaagaactacgcgcgggtttgtttgaattgacagcaaacaaacccgagcgtttcttgcgcagatgatttcttttcgcgttggtcattgtccagaaggctggcgccagaaaccgaaagcggccccaccgaactcgttcaacttgttcagcgctttcgattggccccgccccgttaaaactgagatgagttcgtgccaggctgtcagcttgaggtcactccagcatttgcctcgcatcgatcatgacgctcaaggtctcgcaggcccttgagcagcacgagcagcacaacaatccgtccattcttgcaggggtggagggctacctcgacgacgaagactgggaagaagcgcgcgtgaagccgcgccggcgaagctcgagtgtggaggccacgctgagctcgtgcttctcctccctgtcgactggcctccacagtgtccgattcgccgtgacaacgcgcgccaagaacctctgcgcgcgagacgcgtctcgtcgaggcagccaactacgcaactccatggtgaagatatcttcgacccaaccggagcgttcgctggcgagatcgaattccatgccagctccctaccaccgatccagcgagccgggcctcgacctcttcggcgacgccgaggacgacgccgggaatcccgctaacatttgtctgtcgaagtccccgtccccccctcagcggcggtcgtcgacacctggaggtagactgtcgaggctgctgtcgacgcggtcctggacacaaggcaccaagtagaccgagtgtgaagctgccgaaatctatgtatccatgtaagttgaagttgtcagagtgatggtacagtatttgtgttgcagttctggagtactgtacacgctctccagcgaaggcatcaactggtgaccactgacgcatcagtgcaacgcctacgtctggtcggggcggtacagcgactcgctcccaggaagacttgactcgagtcgagctacactaaccttgaggtggcacgctaacactgtcggagagtatgtacatgtacagtagtgtgctgcggttgccgcttggacgcaagagcgcgctccaaccttattgaacaaaggatcgtgactcacgaatcgtgagtcacgagcgcccacttttcattgcgactcagccgcgatgtcggccaggagcgttgaacgctcagcaacgctgccctaaaagctaggtcgccgtccgtggtggactctgtcgaggatcagacgcactcaacacatgtagacgagctcccagacctttaccagcccaggtcgccgccccatggtgccccctgtggctgctggtcattgtgttgaccccaagcttccacccaggtaccgatttattggtacgaataaatagatccgttcgcgccgtcccatttctgtgccttttttcggatagcaatgactaccggatagaatttacgatgtaaaccatcgaacgcacggcacttacatgttaagaggtctgtgaaaacaggagcttgctggagggggctggaagcttgttagcgtcgtacttagcgctagcaagcttgagtgtgcatgcatcaacgcaacgaatcgctccatgaacgctacaggtagtgcgtcgcggactacttggtagtcactttcttgccattcttttttcggtggccccatttcgctgccataccgccccatacagagaataggataagtcaatgtaatcaacattcccatacagagaataggctctgaacccataatttgggcgcgcgcctgtccacgtcgcatgtcattgactgacaagctctggctccatcatcgtgtaacggcaccagtcctcaaaaagagctccccacataccgtacacactgtagcaagcgtccgtccatcgccatcgccatggccgagcccggggagctcctggtgcacgtgcgccagcgcctggacgcgatcacctacgaagaccactcgcagtacctgctgagctcgctgcaggcctcgcccttcgtgcagtcgctctccgtggcgccgaccacgagcacgagtcggcggcgcccgacgctgctgggctcgtggctgcgctgcgtggggctcacgggcttctacgtgcgcctcgtgctgctgctgggcacgggctggctgctggccatggtcggcatcttcacgttcctgtacgcgctgccggcggcgcaggaggacatcgtgctcacgagcacggcgcaggtgattctattgctgggggtctacttcctgggcggggccgtgggctgcctcgccttcggggtgtgcgccgaccacttcggccgccgcccggtgctgctcagcgcgctgagcttctggctcgtggtcaacgcgctcacggcgggcgcgtggaactacgcgtccttcgtgacgctgcggctgctggccgggatgggcatcggcggccagttggcgctgctgtcgacgctcgcgctcgagtacacgcccacaaggacgagggggaggatcacggtgctcacggtgtccattgcgggcttgggagtgctgggaggggtgggctacggccaattggccacctatgcgctgggggatggaggactcgggtggagagccgcctatggcttgctgagcgccatcgcgctgctgtacgccgcggtgctctacctggcgctggaggagtcgcccaagtacttggccagcgtcggccggacggaggaagcgctctacgtgctggagaagatcgagacggcccacggcatcacccgccaggccagagtgacggtgccgacgagtttatatgagccgccgtcgcagtgccccaaggtgagctacgagcggtatttggagagcagctccgactcggactcggacttgggcttggatctgcggccaggacagcacagcggccaggacgaggagattcagagggaaatgcgcgcaaggtcggcgtcgagaagcaggagcaacaggtacagctatgcagggccaggggcagccaaggcacgcagtcagagccaacgagcatccgcgaggagactgcagagccggcatcagaaccaggttgaagtctgcacgccaagctcgggggatctggggactcccagtgattcactggcccctacagcagatatctcttttatgagggcccttgcgcgtcgagtggtggcgctgttctcggggtctctggctcggcggacagcgctcatttggttcttctggttcgcagagtgtacgtgcttgagcgcagcaattgtgacgacgctgatgatggctgggacgttcatcaaggtgaaccaactgggggcaggctttggagtcggggatcagctcttctggtcggccatgacgtttcctggcttgatcctcgccgccatgatggtggagaccgtgggccgacgcggaacgttggccttgtttgtgtttctcgctggaattgttatggtaacatcggcttggctactggaagagaacggggagtggctgggcttgttgctgtcgctggggacgctggtattggcgacaggtggcaccatcggctcgatcatcccctttactggcgagcagttcccgctgctcactcgagctctgggtatctcgtgtgctgcagcttggggccacctcggtatgttcgccggggcttatctcgtgcttcgacgagtcatgggcgacgaagcgtggtcttggcacgatgagcgtgtgatgctggcagtgtgcggcggggtggccattgttctgatcccgttgattctgctcatgggaccggagacgcgcaggcgggacatcgatgcatcctggtttgaagacaacaaggcgcttcacgctcttgcaggtggcgtgttgtcggcagcccccggtggtcgtccggagcagccagaaacgagattccgcggtgtaagcaaggcaagcagtggtcgaggacacaagaagaagctggataaagcatccaagtcgtccgacggagatgaccgagagcctccgaggtttgctaggggctcggtgaacggcatgacgctggctactccagtgcttcactcgccaaactcagcagcgtttgccacaacgcactcgcctggagactacgaatcgcccgctcgctcctcctcgtcgtcacaaggcttctggcagacccattcggtgcgccatctaggccgcaagatgaaacaagctatcacgcacgcgtcagatgagaagcacgtggtgtatctcccctccgaggacaaactgcgcgctcgaagtaccagtagcgccaagcaaacccgcagcgtcgacgagcgatgcgacactgtcatcgatgacctcgatcaactggacaccatcatcactgagcacgagtaccgccagcatcgcctgagtgtggacgactccaagcagagccaaccgcgacgtcaatccgtactggagatgctggagcctgtgcagctggaatggcgtcgatccatctcgagctcattgtcgggctcagtgcgagacctcagcagtagcagcaaggccagtaaggccagcaagacggagctcagtgccacggacgtggagtccgccatcgccgcgtccgacgctcgccccagcgccgcggggcgttacaccatcgacctcgacatgttcgacacgttcacgtacgtttccacgccggtgctgggcggcgacaactactcggagcacgaacaccgcgagcccagcaacctctcgtccgccagcagcggcgactcgaagcaaacgaccagctgagctcctccgccgacgggaagcgtggagtcagcatttacaattgtttgctctatgtattgagcttccgacgtaagaagcggcttaagttacgataatctaatgtaggttttgttgtccaggcgtcccggtacgtcctccaggtgtcctcagcccttttccatgctgcaccgcttcacaggatcccgatcgactcaagaggcgcttccaagctggaatatccccatcagatcctcaagtgtatcaagatggcgagcaggttgacgcaaatgctgtggttcttgtcctgcgtggcatctctcctcctccatgctatcgaagctcaaacagctacggacccgtggctgcacgcgtctccggccttcatgcggctccgttggcccagtgcgagcctcttgcaggtctcgatgacggagccagctctggttgcagggaccaagtccttctactcgactgatgccgtcacggtgttgagcgtccgcaacacagcaaagcgacgtacgaggtgttgttcctgatcggagacccactcctggcgttcaacacgacggtggcacctgcagccctcaacacaacggggctagctgctgccttggggaagcgcctagagtcgatggtgctcagtgttgcaggcgtgcaaatgcctccgagccgatgtggcaggttgtcactgcgtttcaaagtggcggcgaatctcgtgttgttcggggatctctcacgtcttgtagctggtgacaccgccggcactacaagacccgccacatttctcgactatgtcttcgcttcgacggagttggcgactgcactgggctctcaggccctcgcaggctcgcaattgttcgctgcgacgctgatcccgtacgtgttccggtatatgaacgtcgacaccttcccagctggaaacccggcactaccaggagctgtagcggatactgccacgctgctcgctgcggtctccaacgacgcgatgaatgcacttcgacgcaagaggcagcaattccagtacgatcctgagcgctacgctgcgtcgatcccgacggacgtgacatacccgtccagcgccacgctcagtagcatggacctcagcggtgtgttcaccacgaccgtcttctggagcaacacattaacgcaagacttttggctggaaagcgccgagtcgacggattctgtggcgtggaatctcttcccttcgacggcgtttttcctcgacgactcgacgtcctcgtcttcgttgcctgcagctccgatagttcgggtcggtaacacgtcgacgccgctgtggactttgcagggatccacacctgaacacctcaacgtggctctcaaactcgtcctgccaggacgagtcgtcctgctagcagcagcacttcaagctcaagcagtgccgtgagcccatcgaatgtcgtggttcgccatcagagccgcctgctacgcaacggagcgaccgataatgtcagcaagttgctgctttacctcgagtttggcgtggcggatgtcacggagaaggccgcggatggctgtgcgcactgtctgcagcttctggagtggtgtacgaacgacgcgacgtgtgccgctttgaaaacgtgcgtactgtcggcgatccagacgcctatcacgcagttggtgagcgcaacgtcgacggcttacgagacggacgacctctattcattattcaatgggtgtctagctggatcagctactgttcccgtggatgtgaatgctcttatgttgttcacaagcgcaattcgatgccaactgcagcgactgtgtccgatacagccgccaagttccagtattgtcgttccttctgggattaaactagcgtggggaagtggcaagggccagcagcgagtgcagccagcgtcaggagtcttgaacttccctgctcccaccagttcaccattgaacatttccgtgagcatcggcacgcgcgtggtctgctacgtgcctctatggaacaacgtcactgctgactggctgcagacgagaatcgctcgctcctgtactttcgcgaagtacttaggcactgttcaagctagcgtggcctcgaacactgcgggggccactgctgtcgacatattctacgacggtctcgtgggtccgttgcctacgttggtctccgttgcgagtgacgcacaaactcaagcgattggagcgacgatcacgaccgtggcgacaccaacaattcgagtgcgatacgtgtctgctggtggtccgattcccttcgcaaccacaacagatccatcgccaactgacacgtgcaccgaatgcaagcggctaacactggacgtgtgtctccgagacgccaagtgtgcggccatggccgactgcgtgatgcaataccaaagccccagtagcaccacgaccgtcaccgttgcctcggactcgtccacttccacgacgtcgttggcagatgcgatcttaaacctcgtgcgagcggaccagagcggaaccaagcgctcgctcgaagctgacatcactgcgtgtctcccagcggccatcaccaatggcgtgtcgaggggcgacgtgaacggcgcgtcttggtgcaagctcgtgaacgctagtgcgtgctacagccgcagtgcctgtccactcgctctcgcgcccgtgctgtcttcaaagtggtcatcgctggcgtccaactacttgacggtcggcaagtggagcatttctcctgctcagaagctgcagcggttgatctacactggttcaatctcgactctcggctcactcaccattccgttgactctcatgcgcgatggcaccacagtcacactatcgagcgctgcagaccccgactccttggcggtatctcttcgcggactcattcagtacgacgacattcaagtggctcaagttgcagtcgacagcacaagttcaagcaccagtgtgacgacattcgcgtggacgatctcttacggacattgggctgggtcattgccggtcttcatttcgtcggaatgcaaggagtggacgctcgttgcctacccgaccatctcagttggcgcagtcatcccgaacgacagcatcctggagttgattcctcgcagttctacaaccacagcctcttcgtagcttaaagacacccagcttaacttgcttgcaactaccaatgttccggttgactttcttttctactgtagtgtttgagtttttcggttgtcgaacacctcagatctaacgcaaactttgatgtctgccgtctgtcaaatcgcaccctacggcaagtacgtgtaagcgagccagaagctgctacgattatcgtttgacgcaaactttagacggtgttctcaccgtcactttccaattcgctacgcaagagagaccacgcttcaagatgcagttcgccaagacacttctcatcgccgcgatcgctgtcacgctgtgctttgcccccaccaacgcggccgacagcgttgacgcgcagcaggacgctcataacgcgcgcaagttgtactacacacgctttccgacccccattccaaccgcacagcccctcctcgtcctgtacgcgactaaactgacagcaaggacttaagttgttcattgtgacgacggaggtgttgctcagaatttgaaagccgtgcatgagttgagtaccaagttgtcggcttgttccaagtccaataactttacgaataggtgttgtgcttaacaaaacactcataccgacgaagaactggaatctgtaagctttttctttctgtggctcgatcaagcggggttgtacacttggccaaactcatcttgcacaagaaaaatcgttcgtcgaaagagctctcaattgctcacatctggccactgaagttggccgcgtcgcccgagtggatcaccgtgctccatttggtcgtgatcttgcggcgcgtggagaaaaactcaacgcagccatcgcccgtgatgtccatgtcgccgtatttgctcttggtgccgtacataccgccgaagctgaacggctcacgtggcacgggaatgccgatgttgaccccaatcatgccggcgcggaagcgcgactggaaatattcagcataggccccgttcgacgtgtagatcgcggctgcattgccgtagtcgtttccgttttcgatctgaagagcctcgtcgaaagagctcacacgatacaccgaaagcacaggaccgaagatctcgtccttcatggcagcgtcgttcgggcttgcgtggagcagcaccgtaggtcccacccagaatccgttcgtctcctcggcccacgaccgaccatccaccagaactttggcaccagcagcctcggcctcgttgatgtacttgagcacgcgcgtcttcgagccttcatcaataagcgcaccaacctgcccagcctcagttccgcgagccagctccttcgacttctcaacgatcatgtcgagcagcgcattgcaatcccccacgagcaaaagcacagaagcagccatgcagcgctgtcccgcacaaccagcgtacgacgcaacaatatccttggaggcgacatcaatatctgcgtccggaagagccaccaagtggttctttgcgccacccagagcgagcacacgcttgtccagagcgcggcatcgacgagcaacgagctgcgccacgcgactcgagccaacgaacgtgacagcggcaacgccagggtggtcgcacaagctgttgacagggtccaccgttccgttgatgatctaaaaccatagtcacaaccatccaaaccatcagcaatagttccagcattggacacacacaactaaactcacctggaagacgcccttggggaccccagcttccagcagcagctccgccacgcgcgccatagtcagaggaacctacgattaacgcaagaatcagctcaaccgtctcatattaaaataacaacacaaagatctcagcgcccaccttctccgacggcttcaggatgacgcagttgcccatggtcaacgcgatggggaccgtccacatcggcaccataatggggaagttgaagggcacgacgcaggccacgacgcccagcggatcgcgcacctcttggcacgagatgccgcgcgacacctgcagcgtgcggccctgcaccagctgcggcagactgcaggcgtactccaccgtctcgttgcccttgagcacgctggcgagcgcctccgtgcggttcttgccgttctcctgcaccacaatgtccgccagctcgtctgccaccccccaaatacaccccaatgttaatgaaacacccctctaatttgttctcagggccctctaactatctcccaccttggtgctgcaccatgagcgcgtggaacttgagcatgatggccgcgcgcgccttgacggtcgtctggcgccactgcttgaaggcctcttggcccttggccaccgccagctgcacgtccgcggccgtggacagcgcgcacttgccgatcacttggctgctgctggggctgatgacgttgaggtagtcgccccccgagggcggcacgaacgcgccgtcgatcaggttgtgcgccgtcaaggggccggccaccttctgcttcttggtgggggacgcggacatcgggcgtgtgggggtgtaggggtgtaggctttgacggcttcttggtggtggattatgcgaagatctgatgacccaaacttcaacttggagttgttcttgtggcgcacactactgttgtgtggagcacatagcgaaaaggaccaggcatttaaaaatgtataacatataataccattagtatgcggcatactattcttgaggagagccgaaacgcaaacccatcgaatacggtcatgcaatcggggtgcaggttctcctactactctacacttccgattattaaccagttttgcgctggtaatccactcaaaagattgcattttgatgtcgagtcgtatggttgattgtctgtgctcctgaaaaagcaaaactggcacgatgtcgtcttgcagcgcgatccatgccggaatggcatcgcagttgagcgcggcaagtagttacccaacgcattcaacatgtataatatcaacgtgtatgtacagtctgtcagttcgaccgcagcctattcggaacggcactctaataaatggcactctatttgatggcactctattgttatagtatgccctcaccatagggcgctctattcgcaggggactctaataccttaggacatactattcggtattatacgttaaatgaaaaccgcttaaactgcctactttttttttacctgctcgtaaggcaaagcgccagcttaagagcgatttcggagtgtcaattttgttttgtcgccccggcgtcattttttggcgcataacgatggttttggcaccagcagaaagaggacggtttcgactatttatggatctacaactgatcaaaaacgttgtgaaggcaacacaaaaccaagcaagttatgaagacgtctcggatagcaggtgcgccagtttaagagagatttaagcttgaagtttgtatgcaaatgctggcgtctctgttcataaaaggttattgaccaatcatagcgctttgatgaaagaatactgcactattactggctgaaaaggtctctcttaaactgagcactctctcctaaattggcgctttgccttgatgcaaggccgcgcgtcgcacaaagaagatgtggatgatatatccataattttcaaataaacaataatacagctacatttattgcatagctatattgctacttttatatttctttttttaacttgcaagtaagtcgcatttcttgctcgacggagcggaatgaacatggcggacatctctcgcaagaatgggaatcaaccggcagcaaagaacccgacaaacctcgagctgactagtacatggtggaggttctgcatgcagccgaggatttcattgagatatcttcggtaggggaactgcaccaactcgcgacaacatgcgccacctggtgttttggatcaacaaagtttctgctttgacgcagtggcgtagaatttacactcggtatgcaatgctttctcctttttgaagctggtttttcgtgcttttttttcttcgtcttgcgccggattgtgaatctgtttccgaagcttggttcggtagttgtagtatagatactcgtttggttgaaagaattcaatttgtgttggagtctgtttattttattttttattattattgaaattctagatcgaattagttctagatatcttgaaattatccatctacaataggtagatatcgtgaacccaatgaatccgacaaaaatcccacgaaatggttggaactactacttcccaatacgtgcgtttcgagtctaacgcagttggtatggctttccgatttgcttgtccagaatcgccgcccaaactcgcgcaactgtgttctgcctgaaggcgataccgcatcggatgtggttcaggctcggcagcgattgacgcgcgccgacaagaagcgcatcaatcactaccacttgacttcattgtcgacgcgtctgccgattcggcgactttgccaaacctgcgcacgaacctccccgatcgaagcagacttgtttccaacctggcccgctttcatgccgttcacaacacgatctgcccccacttgagcaagtcaagtcccacccggccaatctccaccgcaaccatgaagtttagcacgttcctcgttgccgcacttgccgtcgtcggtgttgtcaccgccgctgccgaccaacctgctgccggtacgctgccggccgtcaaatccgccgccgaagcgctcgagaagcttgaagcgtccgaattgcccgatggtgtcacgctcacgggcgccagtgagaagatcgacccgcctgccggtgccgccgccgcgatcgccgccaaggaaggtggcaatactaagcacgatggtgacgacgacaagaaggagcagtacggcggctggggtctgggccttggcgctggctggggtctcggcggcggctggggcaactggggtggctggggcggctacggcccctaccgcttcggattcatgtgcggcggctcccctggctgggcctacccgctgggctactggaacatgttcggcgcgggtctctacggcggcagctgcggcctgggcatgcctttcggcggcctctactactgctagcttcgactacgtacgtgatcatgatgagccacctacgcctctggcgacttgcaccgagtaacgaagtaaggttcatcagctgtaccttggcgcagtggcgtagaatttacactcggaatgcaatgctttctcctttttgaagctggtttttcgtgcttttttttcttcgtcttgcgccggattgtgaatctgtttccgaagcttggttcggtagttgtagtatagatactcgtttggttgaaagaattcaatttgtgttggagtctgtttattttattttttattattattgaaattctagatcgaattagttctagatatcttgaaattatccatctacaataggtagatatcgtgaacccaatgaatccgacaaaaatcccacgaaatggttggaactactacttcccaatacgtgcgtttcgagtctaacgcagttggtatggctttccgatttgcttgtccagaatcgccgcccaaactcgcgcaactgtgttctgcctgaaggcgataccgcatcggatgtggttcaggctcggcagcgattgacgcgcgccgacaagaagcgcatcaatcactaccacttgacttcattgtcgacgcgtctgccgattcggcgactttgccaaacctgcgcacgaacctccccgatcgaagcagacttgtttccaacctggcccgctttcatgccgttcacaacacgatctgcccccacttgagcaagtcaagtcccacccggccaacctccaccgcaaccatgaagtttagcacgttcctcgttgccgcacttgccgtcgtcggtgttgtcaccgccgctgccgaccaacctgctgccggtacgctgccggccgtcaaatccgccgccgaagcgctcgagaagcttgaagcgtccgaattgcccgatggtgtcacgctcacgggcgccagtgagaagatcgacccgcctgccggtgccgccgccgcgatcgccgccaaggaaggtggcaatactaagcacgatggtgacgacgacaagaaggagcagtacggcggctggggtctgggccttggcgctggctggggtctcggcggcggctggggcaactggggtggctggggcggctacggcccctaccgcttcggattcatgtgcggcggctcccctggctgggcctacccgctgggctactggaacatgttcggcgcgggtctctacggcggcagctgcggcctgggcatgcctttcggcggcctctactactgctagcttcgactacgtacgtgatcatgatgagccacctacgcctctggcgacttgcaccgagtaacgaagtaaggttcatcagctgtaccttggcgcagtggcgtagaatttacactcggaatgcaatgctttctcctttttgaagctggtttttcgtgcttttttttcttcgtcttgcgccggattgtgaatctgtttccgaagcttggttcggtagttgtagtatagatactcgtttggttgaaagaattcaatttgtgttggagtctgtttattttattttttattattattgaaattctagatcgaattagttctagatatcttgaaattatccatctacaataggtagatatcgtgaacccaatgaatccgacaaaaatcccacgaaatggttggaactactacttcccaatacgtgcgtttcgagtctaacgcagttggtatggctttccgatttgcttgtccagaatcgccgcccaaactcgcgcaactgtgttctgcctgaaggcgataccgcatcggatgtggttcaggctcggcagcgattgacgcgcgccgacaagaagcgcatcaatcactaccacttgacttcattgtcgacgcgtctgccgattcggcgactttgccaaacctgcgcacgaacctccccgatcgaagcagacttgtttccaacctggcccgctttcatgccgttcacaacacgatctgcccccacttgagcaagtcaagtcccacccggccaacctccaccgcaaccatgaagtttagcacgttcctcgttgccgcacttgccgtcgtcggtgttgtcaccgccgctgccgaccaacctgctgccggtacgctgccggccgtcaaatccgccgccgaagcgctcgagaagcttgaagcgtccgaattgcccgatggtgtcacgctcacgggcgccagtgagaagatcgacccgcctgccggtgccgccgccgcgatcgccgccaaggaaggtggcaatactaagcacgatggtgacgacgacaagaaggagcagtacggcggctggggtctgggccttggcgctggctggggtctcggcggcggctggggcaactggggtggctggggcggctacggcccctaccgcttcggattcatgtgcggcggctcccctggctgggcctacccgctgggctactggaacatgttcggcgcgggtctctacggcggcagctgcggcctgggcatgcctttcggcggcctctactactgctagcttcgactacgtacgtgatcatgatgagccacctacgcctctggcgacttgcaccgagtaacgaagtaaggttcatcagctgtaccttggcgcagtggcgtagaatttacactcggaatgcaatgctttctcctttttgaagctggtttttcgtgcttttttttcttcgtcttgcgccggattgtgaatctgtttccgaagcttggttcggtagttgtagtatagatactcgtttggttgaaagaattcaatttgtgttggagtctgtttattttattttttattattattgaaattctagatcgaattagttctagatatcttgaaattatccatctacaataggtagatatcgtgaacccaatgaatccgacaaaaatcccacgaaatggttggaactactacttcccaatacgtgcgtttcgagtctaacgcagttggtatggctttccgatttgcttgtccagaatcgccgcccaaactcgcgcaactgtgttctgcctgaaggcgataccgcatcggatgtggttcaggctcggcagcgattgacgcgcgccgacaagaagcgcatcaatcactaccacttgacttcattgtcgacgcgtctgccgattcggcgactttgccaaacctgcgcacgaacctccccgatcgaagcagacttgtttccaacctggcccgctttcatgccgttcacaacacgatctgcccccacttgagcaagtcaagtcccacccggccaacctccaccgcaaccatgaagtttagcacgttcctcgttgccgcacttgccgtcgtcggtgttgtcaccgccgctgccgaccaacctgctgccggtacgctgccggccgtcaaatccgccgccgaagcgctcgagaagcttgaagcgtccgaattgcccgatggtgtcacgctcacgggcgccagtgagaagatcgacccgcctgccggtgccgccgccgcgatcgccgccaaggaaggtggcaatactaagcacgatggtgacgacgacaagaaggagcagtacggcggctggggtctgggccttggcgctggctggggtctcggcggcggctggggcaactggggtggctggggcggctacggcccctaccgcttcggattcatgtgcggcggctcccctggctgggcctacccgctgggctactggaacatgttcggcgcgggtctctacggcggcagctgcggcctgggcatgcctttcggcggcctctactactgctagcttcgactacgtacgtgatcatgatgagccacctacgcctctggcgacttgcaccgagtaacgaagtaaggttcatcagctgtaccttggcgcagtggcgtagaatttacactcggaatgcaatgctttctcctttttgaagctggtttttcgtgcttttttttcttcgtcttgcgccggattgtgaatctgtttccgaagcttggttcggtagttgtagtatagatactcgtttggttgaaagaattcaatttgtgttggagtctgtttattttattttttattattattgaaattctagatcgaattagttctagatatcttgaaattatccatctacaataggtagatatcgtgaacccaatgaatccgacaaaaatcccacgaaatggttggaactactacttcccaatacgtgcgtttcgagtctaacgcagttggtatggctttccgatttgcttgtccagaatcgccgcccaaactcgcgcaactgtgttctgcctgaaggcgataccgcatcggatgtggttcaggctcggcagcgattgacgcgcgccgacaagaagcgcatcaatcactaccacttgacttcattgtcgacgcgtctgccgattcggcgactttgccaaacctgcgcacgaacctccccgatcgaagcagacttgtttccaacctagaccataccgtcaaaacactaatttccccgatcgaagcaggtttgctccaacttcatgccgtttacacacgaactgccctttttgcgtatctagatatcatgagtctttatagctagttattctgaggctattgtgtcaaagcatatttattcagatcggtacgtcggcttttgatcgagagtttatggtatcgtagcggggagatgccctgagtttgtcgacgaaagtcactggcgtgatacagtaaccgcgtgaagaaaacttgcatttaaactgaacgcaatcgatgtaaccaattcgaacgagctgtcaatgttttacctattggagtggcgcttaatgagacccaagtcacggagccactggatctatgcattgcacacgtaaaacttcacgtgagtcccccactggaagcctcatcaatcaatgctatagtgaccgtgtaccttgccctccatcatctcgaccgtgtaataggtcaatttaaactagatttgaaacggtgcgcctcgaagcactctataagctccaaatacttacgatagggctttctccacctgcttgcactggagaacgctctccgcaaactcaccgatgactttgacggaccatgggcgcagcttgggcttggtttcctgggccttggcgttctcctcttcgccttcgtcgtagtttccctcgtagaatgcgaggtgaccgccgctcttggtcgtgcaaaggataatgttctcgttagcctcgacctcctccttcgttggcagcgaggtggccacgctgatggggtcatcctcggcattaaggcacagcagaggcaccgtgaccttgggcagccgcgtgacgcacgacccgtcctggtagaactcgtccacgctcttatagttgaagtgcttgatcgtgaacagctcgtcaaactccgacaccttcgtgaccttcttgagcgcctccacatcgatgcccggatagtcgcggaacacctcatgggcgttgctgcggttaaagaagaggtcgcgcagccctgcgctcagcacgcggctgtacgtcaggcggttgaagagcggcccctcaatgttctccgagcacttgggcatgttgaacgggttcccgactgagatcgctgcagtcagtcgcgcctgatccccgtcttcgcccagatacttcaccagcacgttcgagcccatggagaaccccagtccgacgaaagcctcgtcggcgaagttgtacttgtccgcgaggtatcgagccacgtagcgcaagtcgtccgtatacgcgatgcagaacaaacgcggggtccggagcggagtgttctggcatcctcgcgagtttaacaccacgcactgccagcccaaggcgttcagtcgctcgacggcgctgcgaatgtaatgttcgccgctgccacccgtcagacctggtagaatcagcacggtcttcttgttgctgtcaacgcgctcctccagcgattccttggtatccttcgtggtagtcgacggcaatagcgcccaatccaaggacactactccgccgtcgggcatatccagcaactggcgctcgtaggcgatggcgggcgtgggctccatctcatttgcccaggacaactgcagcgtctgcaagtggccgttgaacagataccacagcgggtagaacttcttcttgacgaggtgcacgcagttggccagcaaccgctcgttcttgggcgtagacttgaacacgagctttggtcgctccgcggtgagcttgaagtgcgcactggcaagtaccgacatgatcttgggcgtgaatgccagcacgcagagcgtcacggccaaggcggtggtcggagcgcttgggatttctgtggttaccgacatgggtaggtgggttgcggacctcacgctcatctatgctcttggagaaatcgccgaaatgattgcgtgtcaaattcgagactggtgtatgccacatgatctagggatatgtacacaaacccatgtaaatcgattttagtatggcacagcatctcatgtgtatcacacaaacctatacagtaatgtgcgtaaatacccgacgggtctacagctaatacccttgtataatttataattctgggcttacgaggtgacgagatggtgatgagcaaaggtactgagctaaaaatcaattaatctcgtgacatcgtattcagcagtaatttgaatattggcgcgctttcgccactttgatttcctttaaaagcgttcacttcctcatttgcgaacaaagcctcaaactaccaaccaaggtattatccactgtatcgagaggtatgtattatcagagaaaatgttgtatgcgctcgaccaaataggagaaggagtagatgagccttataaggttgacgttcttaccgctttgatgtggtgtgaggacgcctggtcgaaggttactgctgatactgtaatgatcgagacgtgacgagcacgtcgtcggcccgccccgttcaagtgcaaggctagggcgtaagcattagtctagcttaggcaccttcactcatgacaaggaaaaaacatgcacatggtgcattatctctatcaactacatcgacgtttgtatgacgcacgtcaattcacttcaacttgaagtggattggccaatcagattgatttactcttgcaccgccttgggcactgcccagacggccggccacagggccttaacgaaataaattcactttcacggtccatcaaagaggaaatcgctccgaactggtgaaccatggccaggccacaaaaacacacaggtccatccaccgtcgacttcgatacggccgttgcactctgtcgactcccagggtttcactcactttggcggcaccctgtctccccaacggttggtcaggacctatcttcaaggttctcctctcaaacgcaaaaactccaacgggcaatgcgcggtcacatcgccatttcgcagatcgtcaacatggcggagagcacgacttcggatggcaagcaagcgacggcgccagctcaaggcacggcgccccccggcagcgcgccacctccgacacagcagcgcaccggccacgcccctgcgagcaccgcaccagcaggcggcggcagcggccaggcgggtaactcagcgtccggcgacacttcgacgggcagcaccaagacgggcgtgaccaagcgcgtctccttctccagcgccaccggcaagacctccgacgcggacatgcgcgaggccgatggcaacgcctcgactgacgctgcaacccaggaaactggtgacgcgaactcagagtccaaggctccagacgcaggcggcgtggctccggacgtggacatggagggcgtccctgagttcaagttaccacgacacgcgacgctagaggacgtcaggggactcatcttcgcaggcatgcttcggcaggaggaggtcggtccccctgacttcctggtccctgaacgccccccgcactggaaactgccggctccgccgaatctcaagaccaacgcgtatctcgtggggatcccagggatcatgaacgacattcgcgcgggcgcgttcgccatggaaggctatggcggcgcgaccacgatggtcggcttcgaggagctctccgacgaggatcttcaggggttgaaggaagtctgtggcgccgacgctgggatcggtgtcctatgtccacgtcgttcgccttcatcttccttctcacacactgccaaagcctcagcagtatcaccttctccataatcaaatcaagtcaaatcacattcacgttttccgtctccaatattcacacattccgtcgattttccccacagtttcacagtgtcacccagagtttcccctgaatatcacgtgtaactctgggtcattgtcaccccagagtgctagactcctgggtgatcatctccagcctgcatggcctggaaacggcccgcgctcttgcgccttgattgaattcgtagagcagggcaccacagttgagcttcgacacaggcagccactcggtctcatcataccccttccacttcacaaggtactcacgaattcgtctcgctgtccgagtccgcttagtccatcgcaaatccaggattcgctcaacttcgtactcatcgttcgcagcgtcgggctcccaactgtcttcaggcaacagcgccgcatcaaagtcatcatcctcgtccacgtcgatctccacagtgggccgcttcgggaatagtgctctgggtttcaaacggctcacgtgtacccagggattcacgcgatatcctgtgttctcgaccctgagtttcacgcggaagttatcatggatttcctgaattctgaaggggccatgccacatgtgagccagtttgcagctcagcccgggctgcactttgggtatatacagtcacacagcatcaacggctgcgaatcctgccatcagtcgttcggacagctctccacttcctggtttgttcggcagagcgcgcgcgcttggccttcttctgaagatcctcagcgcaagcttgtgcataactatagtcacgctgtagcttcctgcgccactcgtacgcagtgcgctcctggatactcgagggcctgggtcctaacattgcagacaccgtgccgtgtgcgtcccagccgtgcaccagaaaaaacggagtgtccaggtgagtggcatcgaacgatgtgttcagggcaaacatcaggcgctcagcatggtcgtcccagtcactctggtccgcctcagcaatgtacgctcgaatactgcgcacgacagtctgcaccgaccgctcctgctgtccgttcgcctgggggcgatacgccagagtggctcgctgcttgctacccaaaagttcacggaagcgcgtgaacacctcactcatgaaccttgggtcttggtcgtgcctcagcatcgagctcgcgccgaatctcctgaagacctgctcttcgtacacttcagcgacatcttgcgccgtggtggaactcatgggtttacacatgacgaatcctgagaacgcatcctgaaaaagcagcaggaacgtgttcccacggtccgacttaggcaagtgtgtcgcgaaatccatagacacaacttcaaaagggcgcctcggtttgatgttcccaggggaaggccctggatttgagggcgccccttgccgctggcgcaatccacacactctttgacgaaaacttccacatcagcgtacatgccgtgccagtagaactcagagcgcagcttctcgtacgtcctcgtgatcccctggtgcccaccctgaaaatcttcgtgagcgtgatgcaggatatccggtcgctgagctatcggcaccacgagtctgagttcgtcaaccatgtctcggggtcgatctctggtagaccgactcaagcggtacagaacttctctggaatccaacacgaaatcatcagcgaccttcgcgagtttcctggcttgagcgtgcgacaacttcgtcgtgtctcctttcaggaaatccttgagttgcagcaggtgatcatctttgtcctggtgcactttgatgcgtcgccagcgttccgcctggtactccagagatcccatgggttcgctttgggcttcgatctcctgagttcgcgcccgagtcattactgcaaacactttggccgccacaggcaacggagcgcactcaggtccagggatacccagagtttcgacaccctgagaatcactcccctgaattccaacgttcaataacacctccggtcttaccaacttctcgtgaatcttggacaccaactacagatgtgttcgttcgtcagcatcctccaccttccaggattcaccaaacgcgagggtcttagacgtcaggtagtctgcggcctggataaactctcgcttgacatgcaccagccgcacagacttgaacttcgtcttcagcacttcatactcggccagcttcctctggagatttggctgattgcagttgatgagaccctgggcttgctggatggcaatcctggagtccccaaccacaatgatgtcctgaattccacgctcaatcgccagagtgaggcccttcagaagtccatgatactcagcgtcattcacagtcacgtcctccaggatgaatccctaggcatccaggatttcccaaccagggacatgccaccgaatgcagccacagctcccttgtcgcgtggaagtcttagcggcgccatcgaaactcagaatacacccctcatagtccgcttccagcatttccatactgataggtactggaggtttaacgcgccccttggctgggatcaggttttcagcgatctcatccaagtgttctctcggggtaatacccgcacctagaattgcagccaagccgtcttcatcccgttcaactctgcgtatctccaggttccagtgggacaacttcagaccccacttcaccgttcgaccgtctgccgactgcgaggtcagcaaccacttcaacacagaatatcgcgtgtagtcgacgatcttagggctgccttcaaccaaagtgcgaaacacctccaggactctcaggatagcaatcacctccttttccgcaatgtgataccgcagctcagcgtcattcaggacgcgacctgtgaatcgaaccgggtgcacaatcctgtcgtactcctgacccaacacagcggatgctgcccacgggttcgcgtggggaataatcacgaagggccttgaacgatcaggatgtctgagtaacggagtcgaaacaatcttgtgcttcaggatttcaaaggcttcctgggctctcgacaggtctctcctggatttcacttgttcctcagtcagctcgtacaggacggccgcgatcacgggtagatcttcaatgaacttgttgtagtaatttagactccccatgaaactctggacgcctttcagtgtcgtcgggaacggcaagttttggacccccttcgcgattttaggggtcgctcggattccctcagcactaatctcgtgagagaggtacggaatggacaacttcccgaattcgctcttgggaagactcacagagatattccggtaacgtagtcagaagagcagcgcgttcagatcctggcacagctgctcccaagtaggcgcaccgtgggcgatgtcgtcgatagacgagcttcgacccaggacagggcccatctgagagggagccgggatgttacgctgaaaaacagtcatctcatccgtcaacactgaaagtcgcggtgcattttcacctgaaactctgggttccccagagttcaaccccaaaaagtctaagacatcttggtcgacctcagcttcttcctcaggggaaagcagcagaaatccccacagacagttattgagaactgcctggtagatcagcggcgcgttcttgaggccaaacggcatcctgacccactggtagtgcccatagggacagacgaacgcagagatcaacttggctctctcggtcatcttgatagcccagaaaccactcgccatgtccaacctcataaaccacatcgccgactcaaagccaatcaaaagatcatcaataagcggcagcggatagtgtgagagcttgataaagccattcaccacgcgatagtcgatgcacatccggatgtcgacgccattcttcttgaggacgatcacgattggagatgcccagggggacgtagaagtctcgatcagcccgttctccagaagcttcttcagaagttcatacaccttagtccacaggtgtgatgcaatggaccttggacgctgggcaacaggtttagcgtcgcctacatccaggtcacaaaccactccacgggcaggtgggggagctgcattgccgtctcccaagaagatcttccgatgatattccagaattcgcctcacttggtcttccatctcggacatcgttttcccagggactccaacatctgcctcctcgagcttgccctcaggggtcaagtcacgcatctcaggaagcataaccaactggtcacgcaactgagagagcaactcacttccttcacgtatgtagaccgcaggctcgtagtcgaggtccactgtcgaaagctgcatacagcgctcatattcctgcttcagcttctccaacggagttcccggcatccctgagatcgagatatcccagcaccctgagaatcgtcgtcacccacatcgaatcccagagaatcaccttcgtcgcaccactgaccctgagaatcactgccaacttcaacctgtaaactcagggtttcagcggccgtatcaccttcaggactcatgccctctggggttccgacagtctgcgaggcaacatcggtcaccgcctcctccagaacgtcacccaagtcactcgtatcaacagcaacgtctcggagttcaggagggtcttcaggaggcactccttcagtctgagttgcagcgtcttcagcgaagcgcacgcgacgaggcttcggtttcctgagaatcgaggcaagcagtgccatgtcggggccctttgcaggtcgcggcagaatcttcgtaggccactgatactctggggtctcgacacaggatggctcaagcgcagccaggcgttccgcccgaagtctgccctcacgcgactgaacactctccagaataagcgtctgccactcccgatacgcaagcgaaccagggcgcacaaagcgtccggcacgtgggaagaagccgtactccacaattcgggcgactggcgttctgtagtgaatccagacgtcgttgtccgaaatgttgaccaccttcacggcgaccggccaggatctcgcagcgtaaatcaggtgcgttacccagcggtcacctcgtcctgcccacacaacctcacgctgtgggttcgtcgatccatacgagatcttcaccaccttggattccccaggggtcaggtaccaactacctgtggtttccacgggcatgtcgaccccaggcgatcctctggagtccatccacacatcatgatcgcctcttcatccggaagtgtcacgagaccttcgcgaacactgatcctcactccagctgcaaacatgaaactcatacccagaagaacttctattccttcgccgatgttagcaatccagacatccaggagatatatcgccctcgaaccgggagtaatcttcacctgagcactggcaccgatgtacgtcggaacgcctcccatgccagacaccttggtttgcttgtgcgacttgagtgtgagtccgaacttacgcgctaagtcgaagctcacaatattcacagtcgcaccggtatccaggagaactctcgtccggcagtcgttcacagcgccatgcaccatcgccacatcacgtttctttgggtcaggatcattgttttcccaccatccgtagcgctctccagggttcagcttgtactccacaatttcttcagagttcaccgacccagagttcgcttgttcaggatgctgattttcaggggaagtcatgaaatcctgagtcaacgtagtcatgcattgttggttatcttgggttcttgttctcagctccgggcctacatacactagaacacataactctggggccttcttcagcccggcgccccacacagcgggcttattggttggacggcctcccagagtttgcttcgccatccagaagtttatccaggatttggctcggcatgtccttcagtgcaccttggcgggcgagtttcttcacagcttccagtgtcttccagtcttcacacggtttcccgagatgcagtttgccacagttctcgcacggttgcgcgcgacacaagtgagtcggatgacccacttccaggcagcgatcacacttcacgtctttccagcagttttcctctgggtgcccccacttgccgcacttctcgcagaacttgtcccaattcgggttttcgcggcgaggggaacggaatcaagagttcgcgttcggtcctggttgggcgttcggtggacgccatcccatgttatccatcacgcgatagacctcgttcgtcagcgcctgagtccactcggcacccttcatactcgcccgactcccagcgctaggcgtagaagcttcttctcgagagatctcacgagttgaccctgaattcgcgctcacacttcgggctgaaactctgggttcgtccgtgatttcctggaaacgcgcgtgaatttcagggtcttcgtctgactcagagtcagagacatcgcccctagtcacatacgcacgtccttgtcgcttcggcttgaaacgtctctgaggaatgttgtcggcacgaaagtcacggactctgggtggcggagcatcatggtcgctgcggctccagacatcttcgtcctgttccagagcgttctctagatcagcgatactcctgaatctctggccccgcagcgacgtcttgaggcgcgtgtccctgagtttcgtgatgaacctccgggtatgtttctccaggcgcttcgaagacttgcgaaagtcaatttcagccttcccagcggcggaattcagacgataaaagaaatccagggcgctctctgagttcttcatctccatcgtgaagtaacgttcagagtacgacgagcgcgctttacagtacttcttcctgaatgtagacgccagctccttccagtcacgctgagtgtgtttgggcaactggttgaaccagtcacgcgcagctcccgagagtttcaacttgagttcctgaattcgcatcttcgtagatcaacctccctgagccgccatgttcgcaaaacgctcccaccaatgcacgcgttccctgagtgacgccttagtatcgaactcacccagagtattcgagttgatgtacggtttgaacgtcaggagcgtagtaccagcttgagccgtagaggccgtcgtcaggttaaccccagggttcccgtccgaactgtcatccgaactctcagaggacgagtcatcattgctggaatcggagcttgggtctgagtccgagggtggattgacatcctgacgcttcttcttcttctgctggtgtttcttgggtgcagagcgcttggagtctgttttagagtcctgcgtggccttagaggtcgctgttctcctgggatccgacgtcttccccagagacacaggctcgagcttgacatcctgcgtcaccttggtctccgtagcgccatgtccccgcttgacgcgcgcgattctgccggaagtgtcggcgggagtctgcgcgagggtcgctcttagctgggaggcggcgacttcggacgtgttcttcggatcagctgtctcccgtctctggcctgtgacacttgcgtttccgttgattacgccactggattcttggggtcgggttgcaacgtcagggttctgagccactgacgacctcacatttgttgccaaatcaggggcgacgattgcgcgacgcgcttgaacttgggccaatgttacacgaaggtcgcgcacttggccggcgtggaagcgctggatattctcggaagactcccgctctcgctctttctccgcctcaagttcttggaccttctgctccatagttgacatttgttccttccaaccggcgtaggtctcggaaacccagcgcgcgcgctccgagtcggcttcggcttcgtgccgtcgccagcgctcggcgtaggcggcatccaggcgctcacgctcaagacgtacagcttccgtgatactctgggtcatcccctgagtttcagtggaactctgggtctggcgagcctccacgtcctgcgcacgccgttccgcttctcctcgggcgatctcagcgtggaccaagtgacccgtaagttcctggatctggcgacgcgcgtccaggtcacattgttccctgaggcgctcgcggcccaaggcatccaggcgttctctgacgagaaactcgcgttgctcctgttccatgcgggcctgccactcctgctgttgtcgcaagacgttcagctcgatttgggcgggcccagacctcgcggacacggacgaaactgacccaagattcctggatccactccagcggctcgacgcagatgattttctggatttcgtcgggcgtcgagagcgcacctcgatcttagagctctggtgttgactccgctcatcggcgaccaccaaatccagcaatcggggcagaaaccctgagtttcggctcggaagtcgtggctgaaatactggggagaccggccttcctgggtgcgatctctgggtcagagtgcaccgacgatgccatctcaacgtcatcttggtcgactgacacaatacgcgacgggatgactgtccgggtgacctgaaatccaagatcaccggcagctgcaaagccaccggcactctgggccacaagcgctagagctccaactcgttgtccaagcgacatcatcgacgaagacgaagagctaccataagacgtttgaacgcccgaggcagtactctcatccgaagcgcgcgaggtaccgacgacacttggcaccgcgcctggggtagcgtccttggcttccgcctccagagaatcacgtccattggacatggaattcaggggagtggaattctgaagcgaggcaccagtcgaagacttgtacgctggaagagaggacagcgacggtgtagacagcgcggatggcgttgacgggacttgtggccgaggcggtccatgctgagtacgcttggatcgtggctcaccatcactcaaccctcgtgggctccgtgaaatcctgagtccagtgacactgaatctcaggacaaactgtcggcccagtagatccgcatcgtagtccgtcatcaatagatcaccgtctccatcttccttgtgatagtccagtcttggtgcttgctcttgggcgcttggtgcggcgtgatcttcagagtttaccttgaaaggcacaccagctaccaccaatctccactcgaccagttccacagcgatgaaattctggggttcctccatgacagagcgcaccagactttctggaatcctggaagcacgcgtcgaagaccagccagggatcaaattgacaaactcaaatccggcttcgcagaacagagtctgcagattggcgacgcactcacgggcggtcatgatactctggggaatcgtagtcgccatgagatcctgagcagttccgacgccccaccgggcgaggtgaaactcagagatccaggcttcatcttgattctctagagacaaacgccacttgaggtagtctcccgttgcgtacgcggccgcgaagtacgagttggcatccggtttcggagtcggccactcataaacgacacttggcggcgtcaccttcccaggattcacctcttcccagcgtcgaacttcacgtcgaacgtacagcaccatgctcccggcgtccaacgccgctgctcccgattccggagcaggcgcagcagatgtcgctttcaggcgtcttcctgggtgccgcttgcgaacttggcgctgaaactctgggttcaggtggtgcgaacccagaatccaccttggaactctaagtcttcgcctcctccttcgctcgcacgggctccgacttcacttccacaacagactcgtccgaagatgagaccaagtcaatcatctccgggggctcaaccgcattggtgcctccctcagacgccagagcaccaccctcgcgggtgtgctcttctgggacttcaggaatccgcgacccagaattcacctccgtcgaaccttggaacccaggggaaacttcttcctcctgagtttgcgatccagcagcaagctgaccttggacagcagacgcctcgacgtccccaccttgcactgcctcgctctcgcgagcagccttcttcaccttccgagcgtcgcggacgactgtttccaggtccttgtgctcctcaggctccataccttgaacacgacgtgactgacgtgacgtcttatcgcgtcctccgtcaccgcgtccactcttcttcgcccctcgtcctcctggcatcttggtagcttgaagttgacgggcactcaacacttcttcaacacttgattccggtgaaatcctcgacaatcgaatccgggcacgcgcaccagctgaggcgaggccgatgaaacctttgtcgcccagggggaggttcgtatagcgcagcccaagactgttccccaggggtagacccagagaatcgacttgagagtcaacagcaagaagatagacccagagattcgcagccgcaaagctttaaaccctgagaatcacaccgtgggtaccttgtgtaatccctgtcggctcgtttgtcttcgacggaacggcactccaccggttgaaaatgtagcctcgaagaagtgcgggagcgcacgtctacttcagaacgcacctccacaccaaaaggtaaacccagagaatcagatcccctgaaacccagaatatcacgaattcagggtccaggatttcagtcaactctgggacttggaactcagaagacaccttacccaaatgccctcctagctcgataaaaccaacaaatacagagtatacaaacactacaactagccgtcacttattcttttggacccttggacggtgggtcacacatacactaggctcactcgagtctgaaattcaggggcctagctcccctgagactcacacaaacgcgcaccacctccaataaaggaagaaaatacaatcactatcagttaccttcccttcacacaagcagtcaatagaaaatcctggaggcgactacctagcaccccagaataccctctggaataatatgaaatgggctaccacgagcacagcaagtgacccaactaagatatggaatagatggatcaccccaggaagctcaaggccgtcactggtcaccacctaactggatttgagtttgatggagcccacacagacggctgtccttcgccgttgatgtgcccttagcgtcccgcggtcgtagtctcgggtcctccggatttccgtcggcaggcttggccgaagtcacttgcgcagtacagggtaaaaggactctgtttggtttttatcagctacttctctctctttctctctctcttcttcgggcaaatatcttctgtttactatgcttggggtcaaatgtcttgtcttgagtataccttggattcagcggtccatacttgcgatcggcttgcgaatccattgtcgcacggcgtcggaagtgccaattgtgggtccttagacttggtttagtatggtgcaggactccctctcgactactcgaaagtatccagtctgtgcatccacaacggttcttcaaggtcacgcatcactttgattgcagactgacttcgaactgactcgaatccctgaaaaccaggtgacactcagggtcatcttctgaaatcctgggaattctgaggaatcttggggaactgtggggattcttgggtgttggctcgggaaacacttaagttcagtatagagagtctggatttatggtccaaacccagagaatcatctttggtactctgggtcacctgcactcagggaggtgaactctgggtcatcgtgcggcactctaggtttcagtgcggcactctgggtaacaagtctgctgcagtgcagactcgtatgtatctcctcaaagccacacttttagtgggtttagtggcctcctgcgcatgatcatggtagtagtgggttgattctcagggtaatttgatcctctggggcactctgagccacagcaagatgaggcgcactctgggatacattctccagagacactttccgccagactttaggcactcatcgtaagggaaagtccgcggctggactgagtgttctctgaaattctgggcgtgcactcccaggattcacacttccagccagttgggcccatctgcggtcagacgctggattcatcctgagaaatcacttctctcccacagtcgccatccatgtcacacgggtacagccgcgccgtatccaagtcatccaccaatcagcatacgatacaaactccaggtcacagaggtgacggcacatcgtcggcaattttctggggaccgcctcgtgtgatttgcatccaaccacctcaacgctttcggcatcgcggtcaacacttcctcgcggcctctgcgtctcctactgctcaagcctcacatctggtagcacaagtcggtcaattttcgccgggcaagtggtcagaagagctccaaccgactcgcctcgctacttcggcttcagttcgactactgctacaacctccggattagggttatcgcttttcgctttaactgcttctctacgtgcactctgacttagcggcattaacgcttttcgctagctgtaaaagtcttgcatagtcgacattaacgcttttcgctagtcgatttttgctaaactagccttacgcttttcgctaacggttagttatccgaaggagtgtactagtttaacgctgttcacttcactagacaccttcacgcacataagcctagtatattgcggaaacctttgtttcacttggccttgaatgaccaaggtgaacaaccaaaaaggtaaaccaaacccaaaacctagtctacaagcagtagatcgacttcgtttaaaggggttactcgcagtaaaccgctttgcaagcttgactcaccacttgcaggctcaggaggggagttatcgctccgaatcagagcgtatactttatcgagaagcttgccacatcctaagtttacaagtagtgcgtatacgctcactactgtgttcgaccgtgaacttaaggagagctcgcgtcaaagagcacttgaagaagctcaagaggaagagctacttattcagggtttcagccagaaaacagccatttccaagtccaagcgccaacgcttgaattagcgctaagtagcgttgtttaagtgttaatttgtgaagtttttgttctttttcgcattgttttagagaaattacactttggctcagccaatcagtagttaccctaaaccacagcacccgtgtaattccgattggagaatccgcgtaattttcagcgtttcctgaattgttcgcgtaattttcgagtatctggtaagctttggcgtaagctacgggtatttttccagtctatgcctaagcgtactgctcgtgagtgggaagaagatcaccaacatcgtcgcattctcaccattgaacaagccgttcaacgcgctttcaccatccgtgctgctacccgtttgcagtacgaggttacttgcttgacggatcacctccgtgaaattttctttccgtttttcgagactcaccttgaccgtgtcatcgagtgagtttggactgtttctctacgagaccgttgaaaacttgaacacctgtgtcaaccgcatcgacaccgaagttcgtgccttcgttgatcgcatcatcagcatcaagcgcgcgcgtttcgagtagttgttgacagtgtcgtcgtagctctagttctagtagctagtagctcgcattcgtagcgtaactttaatcagcttttcgctcaagttacactatcatgacttcgttgaatcctggtggatggtctgctgaccgtcaaacccagtctgtggtcgaaatggtgcagaagcaacaagcactaatcgacgttttgacttcgcaacgcaaggaagtcaaagttaagggcataagcctacctcgcttctatggaaacatgggcgactcggttgagttgtatttcgaccaagttgttcactactttgaggcgaagaacattgattggcaagatgagaatcagagtaagcgcattattgccatgatgaccgccaatttcaggggaaatgctgctgcatggtgcatgctttgcagggattccatcagtgacgcccaagacttgatccagaagctcacgaaggaattcgttcctccggaccttcaggagcgccttcgagatcgattgtacagtctcaagcaaaaatgttgttctagcttagaggactacatctctcgattccgcgttgctatcatgcaagtcaaggacatgagtgagcttgacaagaccacgtacttcattcgaggtcttgttagccccacgaaagaagaagttcagtatcgtcgtcgcacgacggtatctgaggctctctcagttgcactcgagtatgacagatcacactttcgtgctggtccgtttcacaagaatcgttggacacctccaaggacttttggacgtgccaactcctcatcattcactcgtgccaacacggctccacagcgtcctgctgacaatgaacctgagcctatggaaatcgacaccggtcatgtgcatagtccacgccgtgacaattatcgtcgccctgttcaaagcaacaatcgcaacagtggcaaccagaagaagtttcggtattgtaagaagcttggccatacgattgaacagtgcttcaaacttcaaaatcgacagaagcatatatcgaacaacaactatcagtctgacaccaagcgatgtcagttcgctgttcacactttggccacagagaagccagattcggttgaagttgttgagataaatgatctcaacgctgccacaatccagtcactaccagctccgaatgagttgattcggaagccaggtctgtgtgagggcaaacgtgtcaccattatgctagacacgggagccacatgcaatgttattcgtcctggattggtggacactattcctgacacattgatctctcaagtcaccttgtttgacggaagcacaacgaagaaacgtgctgttcacaagggcaaggtcacgattgagatggatggctatcgattcagagacttagaggtcctggagtggacaatgagttctgagcacgatgtcattctcggaaaaccctggtttaccaagtaccagccgattatcgattggcgtactcatcatctacagttcaaaccgcaaggattgaaaccagtgttgcgcaaagttgaagtatctggtgctgagctcaaagccaaagccaagcgtcatgactatgaggagatttaccgcgtcaaagttactccagctcaactcgtcacggaggaaccgcaagaaattgtgcctctcctggatgagtttgttgacgtctttccagacgctttacccgatggattgcctcctcatcgacgcgtggaattcgagctcaacatgaagtcagatgctatgccaagcacacgcgcacctttccggctctcgaagacagaacaagaagcccttgatctgtttgtcgaggaaaagttgaagaaaggttggattgaactatccgattcaccctgggtctccaacatctttggtatcccgaagaaggaccctaaattagggagacaactctctcgagctgagtggctacgatcgggaaacgccacgttaccgattcgtagggtgattgattatcgttggctcaactcgcagacgatcatcgccagaattccactcccgagaattgacgagacatttgacaagatgtatggatgcgtcatcttctcagtcatggatctcgcgcaaggttaccatcagatgagggttgccttgaagaggcgtcagtacacagcgttccgcactcattttgagacctaccagtggtgtgttgcaccaatgggtcttgctggaatgccaggtgtctggtcacgtctgatgcgtgtcctattgggcaaatacgcgttgatcgtggtatacttggacgacatttgtgtattttccaagaacatgaaggagcatctgcagcatctccgcatagatttcgaagtgttacgcagggaaaagctgtactgtcatcgttcgaagtgtcattttgggcaaaatcaagttcagttcctaggtcacaccgtgtcgagccaaggtattgcggtggatcctaagaacactgaagtgattgccaattggccagttcccatgaaccaaaagcaattacaaagctttttgggtctcgcaggctactaccgtcgcttcattttcaactacgcgacaatcgccttaccgtttggatctctggtcaagaaggacaacacctggaactggaatgaagagcatgatatcgccttcagcaagctgaaaacagcactacaatccgccccagtcctggctttaccggatttctctcttctgttcatcgtgacaaccgatgcttcaggatattgcgtgggtggagtgctttcgcaaaagcacaacgaacatgatcatccgttagctttcctctccaagaagttgggtgtgcatgaacaaaattggcctacccacgagaaggaactctacgcaattaagccgtcgttggaaaaatggcgtcattatctctatggtcgtcatttcgacatctacaccgacaacagtgcatgtcagtggttgttacaccaccctaaggtttcttcgaagcttgcacgcttcttgaccttctttgctcagttcgacttcacactgcatcacctgaaagggtcgatgaatgtcctagctgatgcactgtcccgtcctccaatggactcaactccgaatgcgtttccatcaccagtatttgctccatctctagtcaacacgattagcgtccatgattgcgagccagacgatgacaaaacgacatcgagttttcgagtagtgtgcgatctacacgcagttaacgcttcgttgtcgactccagacagtgaaagctcgactgttccagattcacagagtgttgtgcgttccgctatcaatacgatcaactttcacacgtgtactccgcagtgtgacagttttgtatcacgctatcgtgcaagacagcatcagaaggtgaatacgaccaaggtgtcttcagctctctcgcctgttgaattttcgggggaggcgatggctgatgcttccgctggtcacctcgccatacatgatctttccgatggttatctccacatccctgttcaagatgcagagatcgccgcatcggttgtgcaaatgcaacacgcaagttcgctaggatggacttcgaatctcaaacaagagttcatcaaagcctaccgcactgatcccggatttcgagacaaatatcgttctccacatgatccatacgtactcaaggatggattgctttatgtgcaattcacggacgaccaggagaccaaagtgatgagactttgtgtcccgagatcgccgcgcaatcgtctaagaacgaagattatcgagcaatttcatgatttcagtattgccgcgcacccaggaattcgtcgtacgtacctccgtatcaagcaatggtactactgggtgtcgcttcatgaagacgtttccgattacgtgcaaagttgtgaaacctgcacacgttggaagcacagcaacgccaagaagaatggcaagctaattccgattccaattcctaaggaatgttgggaagtcgtctccatggatttcgtcactggattgccagaatccgacggctatgatgctatcatgaccgtcgtggacaagttgtccaagcgtccaatctactgtccagttcacactactgatgatgccgaagaaatcgctcattacttcttcgacaatgtcgttcggcatcatggagtgcctgcagtgatcatcagtgatcgtgatcccaaattcacgtcacgtttttgggactctctcacgcagatcatgggtgtacagttgaatatgacaacgtcatactgcgctcaagctgacggccaaaccgaacgtcaaaacctggtactagaagatgcactccgttgcatggtctcgtatcatggtgatgactgggctgccaagttgggaacgattgagtatgctcacgctacgctagtcagtgcttctaccggactttcgccatttgaagtagacacaggacgtaaggaacgcaatcccttcggaacatttcctacgctgtataccacagttcaagtacaacaaggactgtctgagtatgcaaaccgcttcaaggatgaacgcgacaagattatcggcaaagccaaagaacacctactcaaggctcaagcatcgcaaaagaagtactacgatcaacgtcgtagcaacgtccgattcaaggaaggagatttggttatgcttgatacacgccgtattccactcaggcatgctgcgaaagacattgacgtcaaacgtgcaaagttagtggctcgtaaagttggtccgttcgtgatcaagcgcatgatcagcgacaacgctgcccgtctgactttgccacgcagtatgaagtcgttgaaccctactttcaacgtagatgttctcagccattacgtctccaacccggacaagtttgagactcgtgttcttccgaaagcatctcgcatcatcacagatgaagacactggagaagacctccacattatcgagcaactgctacgcaagcgccagttcaaccgcaagactgagtggcttgtcaagtggcatggtcttctagaccacgaatattcgtgggaactcgagaaagacatcaaacacgtctcgcactggaaagttctcgtcgacgacttcaagcgccgtcaacgtgaagtcaaacccgggaggatgtaaggatcgagacgtgacgagcacgtcgtcggcccgccccgttcaagtgcaagactagggcgtaagcattagtctagcttaggcatcttcactcatgacaaggaagatacatgcacatggaggtcgagcggtgacgcttcttgtccttggtctcctcttcggcccaatcaggaactgggatctcgatctcgcggagacgctggtgaatggacactgacacgcggtacaaagcgttgtggaggtccggttgcgaagccttaatgagcttgatgatggccttcttctccaccggacgctcggtcttgttcgttttgaccttctttaacagagcctctagaatacgatcggatttcgccatcgagttgtagaggtcctgccgagccttgtccgccttgcgtgggttgttaaccgcaagcctcaggaacgagccaatcagcttcgttttcttgtccttgtggaccttggagtgtgctctcgtcatcacctagccctaccgggccagaaacagcaagtcgaagttagtgctgtgccgggctaccaagatcaaaaactgactaaccggcttcgagacttatagtgctcgacttagttcggtgcagtcttcttagaacagtagctacttgggctaatgggctgttaccggggccagttgaaagacaaacttgcaccacggctgcccaccagttctttcccacgttcagcgtacagtaataggttgccctactacagtacagatgtctccccaacagctgggttggtcacgctgacgtgacacttacaccgcaagctggaaatgcctccccttgaagtgccgtgcagcggcgagccttccccccgcaagtgctactagatgtcgtgtttggctccggagtgtaggtggttaaggtgaagagtcctggtcgatgggccaggaagtgttgagatcgaagtgcgggacacgaggtgtatttgctaatgaatccttagcctaacatgcatgcctcgctgtgctcctagatgagcacagcgcgatatttgcttatttctgttgtgtcttttacctatgtgtttgtcctcgtctctttatgttgctttcatgtatttcctactaaatgcatgttcactgtttctgatttcttttctttttgacttaatgcatgttcgctgtgactgctgaccctctcggatagcaatcccatgcgtgttgagcctctggtcacgagcaaacaagcccgagcctttgctccgcatcgctctgacgtgcttgctcagcaggccagaggtgctgggcatgacaattgattatagttgcggacgataaagacgaggtggtcatctcacatttcagatcagtttctgcaccatgatttgccacatcggtaaggatgcaaatttagtacagagatttgtatggttaaaccagccctattcagtggggcacaattgtgaaaatagttgaccaagcggcgcacagcagcaaaaaagagcttgttttgacgatcttggcgattttcatgtacagaaatgtgcgtgaataccggacgcctgatatatatatatacataaggtctccaagagtataaggtgaatcggattggttaggaaaaagcagtgtattgatatgatttagctcgtcaagaaattcatggcggccttgttaataaggcccgagtgataccagcaatgctgtatggtatctgtgaggcttgagcagtaggagacgcagaggccgcgaggaagtgttgaccgcgacgccgaaaccgttgaggtggttggatgcgaatttgaaagtgagtttatttcgaaaaggccctgtggctggccgtctgggcagtgcccaaggcggtgctagagtaaatcaatctgattggtcaatccccttcaagttgaagtgaattgacgtgcgtcatacaaacgtcaatgtagttgacagagataatgcactcgctagtcatcgacctctcacgtgtcatcgacctcttcaaagtcatcgaagaaggccaggacctcccacaacgcataactcggcccatcttaggaagtagcgtaggctagcgttcaagcgggttgttggtccgatttacgatgtcttcgctcacactgttaatgttccaccactccggcttgaacttgtagatccagattttcttgaagtacttctagaacttcttccagttggaccaggagtaaccaataaccctcgcttggcagtcgcgcttgatcatggatcggacctcgtgggcgcctcggagggtatatccataggtcggataaccgttgcagccctcccgcattgtcaaatccacttcatcttccgtgatcttcaacttcaacatcttccgatggagcgcttgcttggagtgaaaaaggcagccaacaattcgggattctggaaactggttctggacagacgtgatcatggcgaactcgaagtcacgcacaacatgcgctggaaagattttctgccttgccccgacgtaaatgttgtgaaatgggcgatcgtacacctgagccgttttcccgtccgtaaggacgtaccaaattggcaaaaagagctccgaaatcaaatcgtagagcatcacaatctccaattggtagaatggagcaggcacacaacgataagttgcgtcgatgaagaccgaactttgccgctacttcatacgatccaaattgtgtccgtcatcagcagcatcccctcttttcggtcggtaacagcaggggccggtccagtcgaggttcgacggaaaccaggtacacaagcgggctcgtgctctccatcctccacagcgccacggccactcacgtagaatttcgccttgcaatttgttcggcggtaggcgctgcatcgatagtgcctggtgtcggttcgagggttgaagtggtattgggcgtacgagtagccaccataatggatagtccctgatccagaattggcgacggcgaggccagtagagtgggcaccatcagttggcggcgcgacttcaagttgggtaccatcactctcttcgtgttccgagcccaaggattggctgagcagtaggaccgtctcggtgtcgctgagctcggatccatcggccaggagcgagttggacatcgattcgtcggatatgtagcctgaggccatggcgcgtgggcgtcgtgggggccggaaggggggattagtgcttagaacttaaaagatttcaaaatgaatgttacgatatggttggagcaaccactacaattgacgacatagcacccgcgatgagacaacaaactctgcggttaattgtgtcactgacgagatagcgatgctcgacactgcggtcttacaaactagcagcctaacaatagtgtaccatacacatgccaacagcctaacacgcacgccactaactaagaaatacaatatgaaaacttcaatcaaaacacaattgaccaacaaatatgtaacaacgccagagcttcaaccacacacaaaagtttccaacaaatacacaacaacttcaaacttcaaccgcacacgacgacaatcgaatacaaatatttagcaagtacacagcactcatgcaattacacaacactaaatttacacaacatcctcaacatatatataatatttttaaaaaatgcccaatctcttgcatttattattaatcgtgtaacctcttgggggtaataatttttgacccaaagttgaccaaaaaaccgtgtagacctccgttgttccttttttgaccaaaaaagcgttaaaaagcgttgacccaaatttgacctgcgcagcgattgacccataaaaaaggttattcccttgaagtctcttggctcatgagcatacaacaactctgggtccatgcggaccacagccgatttattggacggtggggcgacatgcttcagcagctcgtccagccccaccgccggcgtgatggacgcttggagcaacttggcgaaatctgtgtctcggtcgcgtctatctactgcttgtatactaggcgagggtttcaatcgtgatttttagggttttgctgttcgcattggtcattcaaggccaagtcaaaacaaagttttacgtaatatattaggcttgcgtgcgggaaggtgactagtgaagcgacaggcgcaaagctaacgagggtaatcgactagcgaaagcgttaatgtctattatgcaacacattatggctagcgaaaagcctttatgccgcttagtttaattgcatctagaatagcagtaaagtgaaataggtaaccataaccctgaggttatagcagcagagccgaacgtaggaagtcgagtcggtcgatgtagatcttatgaccacttgcccggcgaaaatggaccaacaagtgctaccagatgtgaggcttgggggcttttagaggtccatagaggccttgaggaagatgagccgcgatggacgcaaattgcaaagtgagtgacattagtgggttaagccccggttgtctcagcagtaaggcggtgctatattaaatgaatcgggccaaccaattaaagctgaagtggattgacatgcaccatacaatacgacaagcagaggcaatcagaggcaatgtatgacttgtgcatgtctcgttacttgtctccttttcgttgtctaaacatgagtgaaggtggctaagcgagggatatgctctcgaataatttctaatcacgctttcctatggcgttgtcgtatgcgcctgttctatcgcactattttagcgcacgcggtacaccgcttggtcgactcgaggtgtaggtgtagcacgcaacaaccgtccgccatcttaaagctacagtggttgtattatttaagtgactacgcggtagacccttaatcttaatgtaacaggccgttctgggtcgtactgcgcgaacctgccatggtgcgctcaaatatctactaccgggacaaatctatcacctgtccattcggctgctagttgttaaagcatacgtatcttgtgatatgttttttttacttagactactggtgcatcaatattaactttctttttaaaaatgctttagaagacacaaagaatggttttagctgggagcgctgcattttggtgttacttatgagttatgttgcttcttgctcaggcgttgacattgtcggcggcctccggtagcacgcagacatgggtccgacaatgcactcaaggcacctgcgcgagggacacgactttggcttctcgtcaggcccgtggaatgtttcccacagaaagaggtacttgtagcacgcatacttcaagcgggtaagtgtgtgacccatgtcaagcggcggtatgttcagctgaaccgcggacgttttgcatttcacgcgttcgatcgagaatgtgtagagagccacaacatgtttagccgattaaaaattcttcacctggtcaatcagagtgtgttatggtatcaaatccagcctatcgtgaccggcgttacctgatggctcgcccactcaacccattcagctgagttacccaccgaggcttcaaaccaccatgtcatgttgatgggttggttttgcataccttactgcggaggtccgcgagcgcgtgccgggttcaatttgggagcaagatgtttgcattcaggctcaataatgtagaattggagcagccaatataaatcatgacgtgactccaatgctacactcggcagctgcagtcgaggtttcctcaggcgtccgaggcaccaaaaagataccaccgttgatttcctcagtaacatctatgcaccaaaaccggaattaggttagcatgattactagacttgtggccggtccagttttttggtgcgctgtatcaatgatgacggcgcctatgatccgctaagattttttttagacgatacagttaatgttcccgttgatttgaccgaccaacttccaactttatggcttggttcttgctgtggcaatttcactctccacagatgcacgtaagccacagatctcatccatactctaccgtccgcacatcgttagcggttatatactccgtatcgactacaagcacttaaacatagatcgtacggaatgcccccccccggaactgtatgtttggacgacacgagtgatcgataaagcgcgcaatccccctaaagtttgcctgttctagctcttattcgggtctattactataatccgtaacacccgctccgttaaggtccatccttcatactatgagcgtctatccaactttaaaggggcgagtgctacggatttatagtataaactacacgtgggtagtgtatatgcatgatgtcgtctttatgtcttgtgcgcagttcttgtccttggtgcacgctgtcgagttgaggttgggttctccacctcaccacttgaaaacttgcgtcactctgatggttttacacgcccgtcttctccttctgttccagccttgcgcgtaggatctgctcatcgggttacgaagcctggagttaagccgcttattgtgggtgcgaatgtcgggttgacagcctgtcagctctagcttcgtcttgaattcgcctattgtcaagctgctactgcaactgctactgagcgccggtgcgccgtccggtccttatccgtcggcctgttgtcttgggtccctacgagtatcgagttgtgtgtgtatgtggggggatcggcttgtcgcactcggtcgccatctgagtggcggcttgccagtccgtcgacgacagaagggtcagctggactcgtttctggcgcgaccatgacatcccgctgccaatcgttgctaactgcggtgacatctagactttactacactctctgccgctatgcgatttgcgcctggtggactagtcttcaccgatgtcaaggatagtgtggctgatcctgttcggttcatcaaaccgtcaatcagaaaacctttttttcatcctcccaccggctaatttccaaattagcggggatacattgctttgccgacagctgcattgcttttctgatggattatgtcagtcagacatttgaaatggtgtttccatgcattgcatatattttcggttcaggtcttgtagggttaacggttcggtgctgtaccgaaacaattaggagggctgcatcgacgccagtttctgtcactgtaacttagcgtaatttataacatgtctgacctttaaagttcggagcagattcggagcaggttgatcacaattgaagtacagaagtcgctatcagatattttcacctaagtgttacttgtgctgaaacttaccgtgcgaggttggtggggcatgccataaaccaattcgccatgccacgcaagcctcgacgccgcttcctcaacaacaacgacgacagcgacgcgcacatgaacgttctcgcgcgttgcctgaaaggccgagagcgcgctcgagatcggctaattgctcgtcctcgatacatcgacgaggaaattgaagtgatggagtaatacatgtatcagctttcccactacggcattgagcgcgatccagcaccgacacctccaccaaaacaagagtcgcctgagaggcgttctccgccgagttcgtagacacctacggtgcccgcaaagagacatgttcgattccgaaaaagacccttccaaatcggattgtctgaaaaagcatttacaagaattcagataactttacatttccgttctgcttcgagcgtatggggaacaatgcaatgtatttactcgatagcttagaatgtcagcctggccctcaagaattgtgggcaaccccaaagagcaggcatagcattcgaggctaaccgagtgatgcattgtgagctgatccggtgaccatacgcttggcaatcacagcgacggagtcttcacaaaggcgagtatatcgcttgaaagcatcagatgcccatcgaccgtgtagctgaatggtggttgtttctatgccggcgcgatgcatgtgtgtggcacctccggctcgtagagaatgagtgccgatagaacgtgggtcgatgcccacttgatgagccaccttgcgcaaacttgtgatgatacgttcagccgagatgacaccgggtacgcccttgcggttctggtacattgtagcggggaagtgatcgggcaaatttccgcgtgcttttcgtatacagagtgctcctaaaaccgggcaaatctggaggtctccggatgacagtaatgaacgcgttatcggcggtccagtctgggtcgtcttcaacccgtgagtttaatcgatactgaggctgccgaagccggttcgccagtcggccgcccatcatgaccaaataggtgtatatcgccatgacgtaaaataaaccacttgaagtacgtgccatctgcgactatctcggatttccgaagtagaaaaaagaaggctagacacagtgtcccccataatgcttgatacgctggggaattgagatcgggagcagagatagagtgaccggtgctttgcgctgctccggagtgtccaatcgacgaagacccttgaggagcatgcatacttgtggatggccgacaggaaccgcaagcgcacgtgccttgaaaaagtgattgattccatgaagtgtatttgcaatggtaccgctcttcggctgccgtccattgcgcccggaacgtgtgcacgaaagaataaaatccgagacaatgaccgcttgctgatcggtattaaccctcgttagccagattggaaagccaaattgcttgcaccattgttcccatcgaccgaaggcccgtttgtacttgtcgtgggtgggatcagcaacggagtgctcgcgcagatacatcgccagtgtgctgtcatcgtggatgcggatttggggggattgtcctgtatccaaccagcaacaagattagtgaataagtccgacttgaccttcgatacggaagcacgggaaccagcgtcggcgtgaatatttgcgataccaggtatgtgataggccgaaaatcggattcggtgttcaacttcccaccaacttaaaagacgaatcagatcttgagcaagcggatttggcgatgatagtttttgttgccacgacactgctgacatgttatccacacgaaagtgaacgtgaaccagctctgcgtcagattttccactccaatgtgtggcccaaaccgatgccgcaaacgcgcacgtcaaaagttcccgatagtttatgtcgaaacaagtagacgagtctcggtgaaacaacgcaatctgctccagttcatgttcattgtactggtagcagaaatatcgctcgcgagtgacgtctagagcacagcagccatactcagcagcatcgacttctaccgtgaaatagggtgctggttctccatgaaaatattgcattggcacgtggtttagtactggttgttggagaattgaccaccaccacaaaagatcctgccgcatgctgtcggtcacgtgaacttttgtataccgcagcagctttctttcaggttggcgaagccgctgcaggaaaggcctagcggggcgtagacaagttgaaatatgccgaagagagcccagcaacgaacggaattctgatatcgatacagatgacttgtggtaagttgtccagacaagattccgtgcttttctgagtttctccggggggattgagacagtagaggccgatgcatcgaaaatgaggccaagcacttttaatcggtggtgccaccctgagaacttggcttcgttgatagattcagcgcccattatgtcgatcatagccagtcgcaacgcatgctcaatccccaagcaattcatctcgttgactacggccacgcatacgtggtcgtcgacccagtggtagccaaaattgctgttgcccgtagtgattgaggtagtccggtgtagatgggtgatgatggctccaccgaaagtttcgtagcaacttggcgaaccggtccaaccgaacggacaacagaggtcgataataagcaagttcagctcagggatcatgccggcaaaaaggtatatggacttgcagtgaattccaacgtgacggaacgcggatgccacatccccagtcagaattttggaaggatggctctcgagacggcgacggcgtaaaatttcatgcgcaattgctgcacatgactcgtaggctggtttgggaagtgcggttcggtccgtgtggtcattgacggacaggcctggtggaaatgctaagtcatgtatcgttctaccgtgcacacttgggtcctttccagatttggcgacgatgccaaacgggctgatctgaatgtacggccagatttccaaaatatcagcatccagcaggagcacacgaccagcgtcttgttcagctcgaaggttgcccaacagaattggtagactttgtaacgcggagccatggtttgccggacgtcgtgtttggtcgggcatgggtcgcgacagcttcacttcaactccattttcagcgtagtccagtaggcgttcgagttgatcgtaagaagcacaagactccttaattacagcaggtacgattgacttgttgggacgataatcatccagagtctggcaccggtagggctcgacaaactcgtgaagttgaggttgaggctttcgtataaacgccgagagggtcgatttagatgacgtatcgatgatcgcaggtaatgatgattctgatggcactggcagcgataagcccactttgttcagagcgttgttgagattttgtcgacgaatctcggtccatgtcttcgctcgttgtagagataaactccacattttggctgtgtgggattcccagcgttggcttgtggaagatgatgaaaacgttaccggggaattgatacgcgatgaattcgatctcactgccgcgtgattcgtccataatgaaggcggctcagcacaatcatgacaagatgccatcaaagctgcactgtgagcctgatgccgtgtcctggatgcggcggaacattcgtgattgttgtcctggatgcggcggaacaatcgtgattgttgggtagagagaccgccccgccctccggaagttgggtgattgggaaatcagggcttcgttcacccgggtgtagtagcaccttaggagctgaacgaggtagtaacccgggagtgtttggtccgttggatgctgccgaaaggtttatagatgtattcataattgcagcatctacgtttcccagaggcccccacggacgagagggccttgggcagcttcacttattagtagggactgctggtttaggagcaaagtatgtcttgatatactctaccagagcgtccggaagtggtgtttaccacgagtgaagccttttaccgttgccacacgacttgcccttgacataatatccatgaccggagaaaacccggaggcagggctccttcccattgacccgaggaacaagtgccgcgatgtctggaggaaaacctcgtagccgttcgtaactggtttgatctcgaggacgctgtcgtggggctgacttgaagttcgcccttggcgatacctggtggtctgtcgtgcttgccgccgtggtttggtgcgctggcgtcgacgtgagcagtgaggagggtagtagcacccattcggtcgagttgtaatccattctttgaacttctgcgcggaaattagcccaccatgacggactatcgctgcgaaggtggttgagcgcccgggacaaaaacatatcgacggtgtgaagtgtcagcatcacacgcggtaaagtcgcacgttcatcatgctgagcgttgttggcgacaaaatcgcggagccgattcaccatttcgttaataaaatcgaagcagtagcgcctggtaaagacccccagaccttcaattcccaaaagaagatgagcatacgtgagtggttgttggccaggttccaatcgtttgatcacaggaagcattgcatgtccactgaagtctgcaagaagccgacgctgtttcactttggcagcgtagttggatgcacaggactgttcaaaatgaaggatgcacgcgccatcgcgtctaatttggccgctggccaaagccatgaggatcgcctctgacttgtcgaactggatcgcttcgtccgtgcttaccgtatgaagtagtgaacaagggtaagcgtacgtactgttggtcataccgggaaacattctgtgcgccgctgtcacgtgcattggcggcgggttgtattccgacttggctttcttggtccatgccccgaagtccgcgctagtaatcgttctgatcggtgctggtggaagttggccgtcatggtcagggagtacgactcgctcctggaccgggccatgaggggcggaaatatggcccaacgctggcgaagtagacaccgccgtgcctgactttagcgcggttaactcggcacgtaacaacgccacttcggacactaattccgttatggtcgcaggcgctgtgggtgttgggggcgctccaatggctgaagtgccactggtcttgatctcagtgccgctatatcagcccgcatggtgcctaactcttgagccagcgctgatagttcagacggaggtacatgcgttgaatggcttgcactcgatagtagctcgcgcaatcaaaatcgcggcgtgcgtccatattagatcgcacgtaatccgtctcggtcgagtcgttttctgtatagcccgtgggggcaactcgctgttgtgtacgggatggttggactggaagttcgctcagttcctgcaggaccggctccgtacccccgctgggtaaatcgtttccggagctgccttgcaccgctgcgctagcctcgctacgagcacttggccctggatcagtcgcctgtctggttgaacgcgcagatcggcgagtagtggctgatgtcgatactcgagttgtagcctccggcttcttcgactttgatgacatcttaccagcccgtgtccgtgttgtcgtagccggacgcttcgtcgacttgttggtagaacgcttcggaggcgccatagcgctgatcagcgggcacgacagaagtggggggggcggggggggcggaaggtggtagctcggctcggagagagatcagaactggtggggagttgcactggcgcgctcggaaaccaccgttcctgatctctcttccgttctatctataactacagatttaggaaccaaacatttcccaattttatcttactggatacttctccggcccgcttcaaaatgacagttgaggtttttctgagatcgtaattaatcgaacgattgaccggattgggtaaagataaagaaaggtgctgtccactaattaacggcatcatgcaggctaactcgctcgagaccagctctcacttacctttccttccctcgcccaccaacgatcgacaagcaccaaaatgcctagagccaccggtcaagctgacattccgcccgcaacccgcctgcgcgtcgtgctcttccttgcggagcggagcgttcgcgggacgcttctccgcggagctattctcactgcaatgactgcgtttggggtcagccgcaacagtgtgaagaacctttggcgcaatcgacacgatgtcgggaccttggcggctccgaggcggatggtggctccgcgcggacgacggctgacgcccaaggcggtggcacagctggtacaagctgtactgctgtgtcaacgccagacacagcgggcactcgctgtagcgagcggcatcccgaggacaacacttcagcgctaccttgccgacggatcgcttcgccgcgctgcgtcgcgcgtgaagccgacagtcaccgctgcccacaagctgagacgtctacagtgggcgttatcccacgtggacatgccgctagacaccgtacaagagcgacgcgatcgttgtttgttttgctatcatttagttctaacttcaattgatattattttggtccatcaacacgttcatttttttaattggctggaatgtttttaaaaaatgtgtattataggtggccgcagttaccgcacgcatcacatgtacgacacggtgcatgtggatgaaaagtggttcaacctctacaaaggggctacaagatactacttgacgactacggagcagctttcctaccgttcgtgcccaaacaaaaagtacataggtaaagttatgtctctggcagttgtagcgcgtcagcgctacgactgccgtcgcaagaaatattgtgatggtaagttaggaatctggcctatcgtggaagtaacagaggttcttcgcaactccgttaataggcctagaggtaccgcagtcacgaaatgtgtgacaatgccacgtccactttatcggcaatttcttgttgaaaaagttttcctgctatcagagccaagatgtcaggtaattgtttttttattatcgactgctcatggattcaactaacaaaaaatgtcatgttatgtatgtagttcgtccagcaagacaacgcgagaccgcatgtcctcgacaatgacgtcgagttggaggcagcagggagagtagaggggtggaagattaagatgcgctgccagccacctcgatcacctgaggttaccgttcttaatttgggctactttgaaccaattcaagcgttacagtaacggatggatataccaatagtctcatcgtcgcagtgacaacagcgtttgacgagcttccgtggcaaacactggataagtgttttgtcaccctacagaaggtgatggaggctattctacggagtggtggggaaaacgacttcagactgcagcgagtgggtaagcatgtagcagtcggtggacggatgtccatgtcgatagtggtcgcaacggatgcggtgacggccgggtacatgcagctgtacgcttaatctcaattccacccttacagttcccgaattccgtacctaattagttggtccacgtggattggtcaaattaacgtgtgggtacacattatttactgggactgcagcaataaaccttacttttgtttttaactggacgcatccctgctttgttctactgtcaatggcttggccccgcaattaacaacgtattggtctgcgtgacctaaaccttcggtgtaatatcgctaaaaattgactgaactgcgataaaaaacctaatgacctttggaaagaggcaccaaagagcagggcttgctcccttgattctgctgctaggcaaataagaaaaatactcacctctgcgcgccactgagagctattcaacggtgtgctcaattcttacagatgagatgtagctttgataatatcgctcataaaccgaaactgtcattctgaagcgggccggacaagaatgttttaacaaatcgttttttttattttatttgttgttacggttgtttatttaatttcagttatcgttgcacatccaccttgcgcacgcattttcccggcaacctctcatggcctacaatcaactcttctgctcctcaacacgcacctcctcgtgaacttctggctccgccttcgtcttggatacctatagcgcctgtcatcgaaggaaggatctctacgtcaccccggtatgtgtgtggatcgctaatgcgatgatttccgctgggggtctacggagaatacacttgagcggcagtcgcaagcgcgacatttggcacatcgctcaccaaaccttttggcgaacatcaaaatgagctcatagtgctggactgctcgctgatagtggcgacgtctcggtcgaaatcatctcaacttcgcgaaagctttttcgagcagcaccacgaacagtggtaggtcaaaatggtgagttgctcgttgtcacatatggaacatacaagcttcgcttcggtggttgggcgcttgtgtcttttggcacgtttggacttcattacaccgcttcgcactcgtataaacagcattcatcttcgtcaggaccgagaccgcctttgcgtatacgaagctgttttccgtatgcaaggactggtactaagacagaccgatggggcaaaaccccactcagcctcgtcacactccaggatggaaaatgaggccaaacactattgcccctccagtattcatttgaacttatttacaatggttaagtgttcttaactattgttttggacgcctgtacaatgaaatctatttgttctcctagccttactacggacgtatgttcagtcctgaaaactgcaaataccctgaccacactgggtaacctgaattagtctgaatttataatctgtatgtcatttgcaaacatccatcatttataccccagcatacctgtttgtttgatatgcacaataccaattgatacaagctggccctgcagagagcgaaggagggttggactggcggggagattgcgaagtgctggtcattgcccgaccgacggtccgctgccaaacacatggatgaggcagcctctatatttatcaataccctttctgatgtgtacaccactaacttggtacgcagcaataactgcaacactcatccctccaccaattgaagtcctttcatacctgctgaatgtgtccgttgaagttaaaatcgagttgctgcggctcgccgaggtgccgcggctcgtcctggggtagccgttgctcgttgctcgtcctcggcgagctcttatcgttggccgctccttcacgcatattaatcttgcccttccttcgcgtcgcctcagtctgtaatttccttcaacccctcggcgaagccaccgtcaaggcggagtggctgcttgcttcctgcgttccagtcctgcgcaaccgctcactccctcgagagcttggtattgcacgcacgaagcaaacggctgcacgctcgaccggaggccgaacgcctcgacgatttctggcccgtgttgctgcgcggaagacctccagccgtgcagctgcgacgaccgctcggtggtacgtctggaccatctcggatcgactggggacttaaatgtttcgtgtctcacggtactatgtcgactacatcgtgtccataggcaagaccgagggatcttggcagcctcgatggttgctcgaagaagatggtttcgccgagtatcttgagcttgtcgacgcctacaaggcggcagctggtacgataatttcggcgagtatgcgctctctcggcctgcctgcggagatggccgctgcacgttccatgcgctcgctcatgctgtcgataccctggggattcctgcgtagtgtttcgatgatatcgtcggttacttttaccgcgcacgcgctgttgctgggaacgcgatcgcgtcggagggtgtcgtgtggtcccccttatcgtccttcattcggcaggttaacctgtctgctcgtggtgctgggcgcccgtagcactgtgaagacacttcgcgtcagccagacccagttccggttgtctggtgtggagacctgcctcgcgttggagcacctgatgttaacgcccgaggtgtacctctgcgccggcatcctggcgggcccccagcgcaagcctcacgcgttcatgcttcaggtgaccacggctggatgcttcgcctcggacgacaacgtcgcccagatgcccctgctcaagtatgcgttctcgtggcttccccaacttcgatttgtgtgccgtgtcctgatttgctagggcgacggtctaattgcagcaaggctacaggataacttgataattgtatgacttcattttcatcttggcttttgtatttcttgaacttttatctggatccttgaagttaaaaccgcgaaatatatccagtcctgtcgctagaagcttatcttcaccttcgttgtcgcggttggttttggcgcttcacttcatcctcttgaactaggtcgcttacttggtgtaggttttcgaggggttcctatgtgagcttctcttcacccacccactttacctggtactgtatggtgctgaggcgcttgcgcttgctcacaatcacttccacgatctgtccaacagtaccgtcatgcaaaatcatttggctcggccgcgagagacaagtgagggccgtagggtttgagtgacccagtgttaaacacagtatgcagcttgactccaggtggcaagttagtatcgtatgcgtgcttggggacggtatgaacgacgaaatacgggccgatccacttaggacagcttgcgggggttcgtaaagccagtgtgggctatatccaagagctttgtactcaggtagacttgatcgccgaccttgaacactttctccgttcttccacgatcgtacgcacctgccatccgcgcttaatcatcctctagggcctctttacattgacgaaggagtgcttctgggtgatcagtgaacttgacgccttgacgtcgacctctgcgcaggccaagtcgattggttgctgctacggctactagtgggttacgagggacatatccaatgtcagcctcgaatggtgacatattgatgctgaagttgaccgcagagttgatggcaaactcagcgttcgcgagatgtacatcccagtcatcttgacgcggtgacacgaaacaacgcaggtactctttgagcgtacgattggtgctctcagtctgtccatcgccttgagcgcgatatgctacagtcatcttcagtttggtaccaacgttctcaaacacttgactccaaaatccagagacaaacttcgtgtcgcggtctgacacaatgttttgaggcataccgtgtaacttccaaatatttttgataaacagctgcgacctcttgagcgagctgaaactttcttcgtcgttgcaatgcggtatgtgtccacttggtgagccgatcaacaacgacccaaatcgagttacgtcctcgcttggtttccggtaggtccgtaataaagtccattgaaatggatcgccaccgctcatccggaatttgtaatggttccaggagtccaggtgtcttcgtctaccgcggtttgttacgctgacagtcctcacagtgtacaatgtatttcttgatcgtaagcaccatgcgtggccaataccagtccaagcgaagcttcaggtacgtgcggtcggaaccgggatgcccaccgtagttgatatcgggcgcttcagcgatgatacggtgcttgagtgccacgatgtttgggaccacgatacgaggttgctcgtttgtagagccttggtaccagatcaggttcttcgcctcgaagtaaggtttgtactgcttttccgatgcccctcacactactgacgcagttccacgccttttgatcgcgcgcggaatgtccccgataaccttgtcctttgtgcatccagcgattatcgccttgatcggatcgacgttaggcttggtctccatatcacgtagctggtagatggtatcgttgaaactggggacgagcaaatcgtggaaattctccgtctccaggccgtcggctcagagcgtcagcgattccgttctcagcgcctgggagatccgcaaacacggttagtactcagccagaataccataccatcgcgcgaggcgccgattcgccatcttcagctggaaaataccttcaagtgacttgtgatccgtctccacataccaccaacggcatactgactcgcgtccgtgcacagatgcatatgccgcgtaaagttggaggtaagtgcagaacttgagggtcagacaaccggcgtttcaacaccttgaagttctgcagctgtaccgcgttaaaagggatttaaagaggtcttcgaattccgctgattcatccacgtgaacagtggagccgtaagctctgggtaccgctcacaaaaacgctgtatgtatccagtcagacggaggaaaccgcgaatctgttttgtggttcatggtgcaggccagacgccgataggctgtaccttgtccggatcaatgcgaaacccattccgcccgatgaaatcacgcagacacggaatcttttccgcacagaaaacacacttggagagcttcacatacagtttgttcttcttcaaaatctccaacacgtcatgaagagagggcaggtgctcgttgatgtccttcgacttcgtgaacacatagatatcatcgtagaacgaacgtgtgtgtgggaggcccttgagcaatgaagaagtcagtcgatgcatcgtcgctggtgcattgcttactcccctcggtaacaccagatactcgtacaatccacttggtggttggaaagctgtatacttgacgtgatccatcttcatccgcgcttggtagtacgctgacatcaagtccatgctcgataagtagtaggcacctcccgtactgtcgaaaacgtcctcattacccgtcatcaatacgctctgacggatcgtgtggctgtttaaataccgatagtcgtgtatgatgcgccatcccacagatttacgaactcagctgcaggaggactgatgctcggcggaatgaatcccttagcgatcctttcctgcacccagctgtcgatctcggccttctggtctagtgagagtttccactgctgccggtacattgcgacgttcgggtccttcacatcgatatgatgatcaatatcatgctccatcggccgtctgtcaggcggttcgggcgtaaacacactgtccttgtacacaacaatgacggggtacgcggggttcttcttgaacgattcccaatcggtttgttgaaatggtttggctttcttcgttccaacatggtcaggttcgtcacgtcgcctgacgtcgcgctgaatagccttgatcgtgttgtttgtcagcgcaatcatgaaatcgtgttccggctggtccttgcaggtaggcgtagaaacttccgtagcttctttcgcgcgatgtacttcgtttgggctccttccgagtcgactactccaagagtgaacattgcctcaaccttggcattcttcttcccccgcttagagaatttctccgcgacatcagtcggtctttcattgacttcgacttcgccctccaacggtgtttctggcacgacggctcgacaagaatcatggcttattgtacgcgagctttcgctggctgcagcattgtgaagctcgatacctattgtcagactgcacttcccgctgggggtcggagttcccaccactgaggctgcaacggagtcatccatcttgaagtatcgacgtttccagtcgatctccggttgtacatccgcgaaaaacggcatcccaagagcacaatcaaacccatcgggaatgtagaatacgacagcgacatactggtagtttgggacaccatcgagacaaacagtgatcttcttctttgtaaaggatagtgacgcatagccagtcgtagcaccgtgattcagcaaaaccacggcgccaatcttgctctcgcgctgctccatgttcccttcaacggcgaacaatggtgcgcgattgtagacgaaagcgtcttcacaaagtagattcagcgtagctgcgtttacagttaaaccttcttcgctagcgctcgccacgtcagatccctcttctactggcgtggctcgtcgttttcctgctcacccttcagcttagtactgcggccgcgcttgaagtgtccaggcttgttgcattggcaacccacagggccatcgttggttcgctctgcaggtgcgtagtgaccagacttgtaggattgtctgctgaacggcttcttgttttgctgcgacccatggaaccgttgatcacactctggtttctcgcgatccggcgatgtgggacagctcgtacttgcaggcttggtccattgcttcactttacgtcgtggcgttctgtagcttgacgtaaacctgcgtggtgcgcttgagtccgtcgcagtagtacctgacttggtcgacttcgatcatgttctcaatacgaaagatcaacgacgggtacttcccattgtactcctcaatgtcaccggtctggcagaattgacgaagcttctgccggagcacctcttcgtagttcgacgcttcaaagtgcgcaagggcgtcgtgggtaaactgaccccacgtttgctcctccactggggtccgagaggcccagaacaggaaccatcccgatgcggttttctccatcgcagtaccagcgatcaccggcagcaagggattgccagtatgatgattttcttccgaaatactatagtagaccatcagtactagggcttccctaaggctgggataggtacatgataacaatggttagaatcatgaaagtcacttcaccgggtgtgcttactcgtccattgtggcgtacaccgagccccaaactgaaaagcaagcctgagcacgcttgtgcttgttatatattgcataagaagatacacacaggacaaataatcaaaaggtacctcgataatgtacgaaccatgaacatctcctgcgcctgcttcgcagccgcagcatctgcccggctattagcacgaagcacgagcgattctcaaatggaaacgatcattctcgtcagccatcattatcgtcagtatcaaccttaaaactaccggttcatgaccagtttgtaccgacgggggggggcagcagacagtgcccgaattaatcctgtttgggctgggctatcagcacttcctcgcttcctatcccagtataatacaaaatgtactagcactcgtgcattcgctcgtaagcccgtctttaatactatagtagtagtactacagtactattttactatttattacaaacacaaaataggacaccagaaatgtcgcagttaacaaaaatacagtataatttcagcatattaaccgaattctgacaagatgagacataaatataactgttagaatgcgcacagagaatgaagatacttatcaatttggacgtaaattacgtaaacacaacaaaatcagatattttatcatggtgttttgtacgtaattagctctttttacaacggtgggatcggcaggggccatgaatgtcgagtctagcccaacaagtgctaccactgatacaagaaggccctgcagagagcgaagggggagagggaagagctgattggggctggcggggagattgcgaagtgctggttatatcccgaccaacggcccgcagccaaacacgtggctgagggagcccctgtatttaccaataccctttcttatgtgatataccactaactttgtacgcagctataactgttacccaatattgtggctttcatccgttttagcaaattgcgtggtccaagatccgatacaccgggcccgatttgcggctgtgggctccgagttgcgaagaagcgacgagaaatttcgcttatcgccggcaaaagtgaccactgccaaagcattgataaggccctatcatattattgtggtatattgttgtagttgctgtagatggtgacgcaagagctatagctgaccatagtgccatgaaatggataaatacgcgtactatagcccccaatgtattagatgtgggtaggtatgaccagcttaaaatgcctcctctttgagacttatgcttccaactcaagtcagatatagctaaatcggacttacctatcttgtaggagctccattttcggtaaatcagactccgagataacacatcaagtctggcggcaaaattgctgaatattacaatgtattcaacccctatatttaatttcctttcaaatcgtttcttttgttcccagcgtgcatatcgattataatcataaacaactcaaatttgctacggttgtttaggtttacagtctttcaactgcaaaaggtaagttgaaaacggcatgagcagagaccaggctagcttcgtacttttatacacagccattgatcgttgtacacttgaatattgtataactactaggctcttcttttcgaaaattaacaagaagtccgtgggttgaagatgtccgcagtcccgtccatactcaaaccaagtctagtttcgagctatctttgtgaaggctggaacagccttcactgtggggccatgcttccattttgaaacgaagtgtgttttctggattttatccagagttgttagactgcaggtgcaaatcactataaaaatgcatgttccgctatcggttataaacgaacgaatcattaacgtatcggaacgtacccgttaactttaataaacgcttggatattatattatccagcggcgtgttgcttgagtcttttagggtcgacattcgcgtgacacgatcgatcggatttcgctcgaccatgactccaaacataactacagttgtgtttgcagtacatgtatgttcaacgatgttacatcggtgtcaccacgttcaagtcatggaacgacacccacgaacacccatgacttcaatttaaagtcgtgggtgtcgttgaagtcttcaaacgatgctggtctcgtttcaaccattctgcatgtgcatacgtaccgttaccgccgcattcaagccttgacgttgtctgcatattattgcaagatagctaaggtatagcgagtgaccagtacatgctcgcgtaagggcttgagatagttgccagtgcatgctttcatggtttcggaacttggtagcaaatccgaataaagacaaaaacaccaactgctgaaatttaaggctacttcgctctaaccaaagaacctcgggcagagctgctaggcacatttaagataaattaacctagaatcaaacctagaatcaaaactacatgataaaatccagagcttctccgtgctttagcacggcttagtattaaaataaaataacggattagtgtaccggtattatagtaatagtataccctgaaaaaggggtaatataataggagagtgtactaatgggaaatcaatatacttggctttggtatctaggcgataatataccatgttccaggacttccggattggatcgtatacggaactgatcagagacttgaacagatctcctagtaggtgttctggggttgcaccccagactctcgcataaagaaaactaactccgagttgcggcaacgggtctgttcgctggaatgctcgccgctgggcccgcctccgcacctgcttcgcgggcaccccgcgcgggtttgctatggctacgctcctcgtaactgctcactgccgtaatatgttttggccatacaaaaaccaagataagacacctgttccgatctgatcagttccgtatacgatcacaaataaaatctaccgggtactttaatcggaagaacccgttagccctgcgtgtggacttcatcggcacgacgaggtgaggcggggcctctttccgaagaaacacttgttcctgtgttgacaaccttaaaaagtaatcaacgcgtgcacgtgtacagtttaatacagaaacaacagcacaccattcgcttccgtatgtcttaatttcttagctaaagccacagactacatacctgcatgtattatcgtgcagtggcaacttcaccaagccgctggctgtccacgtttttcgatgcatccgggtcgaattgaacgcagcaggcgacgtgtcaatgcaagtctgaatgtacggtagtcgtctgcacgaataaagtggatcggctcagccttcatcaagtcggtgttgcgccatgttagatccttctaggctagcctccttgatcacgcgagccatacgaagcagccagtgtctgcctcatcgagcggcactcctagccctcactttcaaattcgcctcaagagaagcacaccaacaaagccacaaagccaaagcccaagcatcatcatgaagctgaccgcggcgattgctacttttgcctttttggcggcaattgtcaatggctcgcccgtgatgcgccaagcagccgacggcgccaagcacggtcagcaacagcaacaacaaggacaggagcagcaagtcgaaggaagccagcagcaacaacagcaaaaggacgaaggcagccaacagcaacaacagcagcagcagactagcagtagcaactgtatcctgactggtacctacaagacgggcacggacatttcgtcctgcagcactgtcaccgtcggtcctcttactgttcctgctggcgtgacgttggatctgagcggcgccaagaacggagccaccattgaatttacgggcacaaccacgttcggaacacagaagtggaacggacctcttgtgacgcttagcggaacggagcttacagttaagggcgacggcacgctggacgggcagggtccttggtactggaagcagggccaggcgaccacccgcccggttttcttccaggtgcacaaggtcatccactcaacgttgtccggtttcaccgtcaaggactcgccgtatcgcacgttcagcattgttgactcggagtacacgactctcagcggcctcaccctagattccaaggctggcaacggtgtcgccaccaacacggacggcttcgacctgagctgcaacgaccacattaccatcacgggtaacacgatctacaaccaggacgactgccttgccatgcagtccagcaccaacactatcttcagcaagaattactgctacaacagccatggtatctccatcggatctcttggcgggaacacggttgacaagacgaccacggtccagggtctcactgccgagggcaaccacatcatcgacagcgacaacggcctccgcattaagactattatcgggctcaagggtcttgttaccgacgtaaagttcatcgataacgacttatcgaacgtcaagaacggtgtcgttgtgcgcgcggactacagcaagcagcaaggaggctacactggtgcacccaccagtcaggcgcagatcacgggtgtgacggtgtctggactcaccggcacggctacgaacctgtacgacatcaaggtgaaccccaacgttgtttctgactggacgttctcgggaattcaagtggatgcatctgtcaagggcacgatcaatggcgcgcctgacagtattagcgcctaaaagcgcgtacttcatttacgtaaatgcaccaccggccaactaggccgatagttgtgaaatgagtagaacaaatttgatgttaacccaattagttgggccacaatacaattcatacattgataatgtacaaacctcacaattcgtgcacacgtttaagtaacattctataagaagcagacaatgtggaacaatatattcggcgcatcgaacgagcgagcgaacaaaccggcctttaaatctagcacctcatatccggaggtgcattggtcggcagcattctgcgtcgggccattctcaatttctcacaaccaagcaagaagctgatgacgacggtacacttgccagctttgttagcgctgctgtcagtgctttctggtctttcctgtcaggcggcaaagacccagctcgcactcagtgcaggcaacagctacaggaacttccggttcgacatagcgcaacgctgctactcgttggactcgtgcttcagcaacgagggctcttacgcttcctggttggcgttgaaggactcatcacagattgcactctacacggagagtcaatgccaaggcgaacatgtgaccgtggacagctcaccgcgcggatctctcaagctggcagacgtcggtttcgacaagaaagtgtcgtccttcatgctttgggagaccaacatgtatcctactcgaggattcctcgacatctgccacggccgggagaacgcactattcaactcaacaaatgctacgattcatgagtcagtggacgcaggatattctgacgcccccactcttcaggattgacttgcagatcgatttacttggaggacgtcgctagcaaggccgtatctcaaacgagtgagtatcgttgacgactacagagtagaacatctaaaacgttaatctttttcaagcagtgcaattggtttgataatgcagatttccccttcagtactgcaattacgatccttgagtgattgctaagtgaagaactaccttgaattagcatgcagcgttaaatgacaacccacgaggagtggtcatttcaagctttgggttcctccttggcgaggacgtcatcgcctggccgcgaagagcgtcacctttcgcccagcgctgcctacatgtacccgagcggtacgccgcctttattaacgtgtccatcgtgcagtggtgatttgcgtgtgggtctgagcacgagcactgcagattcgctcgaagaggtttatcataaacaaagctactattgagctacatgtacaacaactcctacactgtatttccacaacgtaaggacaagttgtcctcgctaatatcctattatgataactttcgggttatcggctagaaaatagcagggaatgcggggtgttttcaggcaatgagcaacaagcaacacgccaaagcaggatggcagcaggcaaatccacgccgctcaaattatggtggggacgcgcataagcagttcaaaattggtcccgtgccgccttgagatggctgtccctatcctcagtgtagcccaccctagacctccgctttgcttgtaaatcctccttctggctgggtcatacgaagttgtgccggatggcgcctacaattggatcagaagccgtctccgccagaacaaaggcttcgccggagtctccagagcggagcgatggcgaggagaaactccctccgaacgaccgcgcggctacgccgctgtcctcaccggtggtctccgatgacagcgaggccaaacacgacgaacaagcgagcgagcaactgtccccgcggtcgcgacggaggcggaagaaccgagaccaaatgcggttggcgcgccagaaagagagggtatgtggatgttggaggcgacgttctcttctaatctcgctagttgagctgacgtacgtgtttgcgtgttggatggaattacaggagaccatgcagaggcttcgcgagactgtgcatcgtctagaggctcgataccaagagaccgtgaaccgcggcattatacagctgccaaacgagtctattcaagctcggagctttacatttgatgcctcctcggacgtggcgtcttcagagtacgtcaaactggtcgaagagggggcgcggctaaaggacgagaacttccgctttagacgagccttacacgagaagaacaagcttcaggaaacgctggagcgcgtgtacgacgattttcaccagcccctgacggacggagaggccagtatgaggaaatgcgtgttcgaggaccagtgtgcgcacgatccgtggaccccattgaccgaggaggaagtttgggcttacatccgggcgacgcacgagagggtgacggccacgttgcaggccatttcacaacgtgcagcgctgaggcagatggaccccactagtcgaccaatgcctccgttcttgggttggcaggtgcgccatcatcgagagaacgacgaggtgctgttctcctttgaaaagcccttctatcacgtgaccgctctacagtcaatgcagcatacatgggacaacgagctggccatgcagagttaccgcaaaccggtagacgcagcgacacagtccatgactgtattccaggtgatcaacgacgacacttacgtgttcaggaggcgcattagagtggaagagcaggttaccacttcatactatctacggttccgactcaagacgaactcaggctacgcgataggcaactgctcggtcagtacgaagccgtcgcaacagccaggacaaatttgggcagagaatatgtcgctgtggacagacttcaaggctgcgcgctcagaatcagatcaggagtgctgcgttgtgcggatcacgggcaggataagcgtcgatgccacagaatccgccgctacccaagctgcagtcgacatcatcttcggactgcttagctgggaaaacttaaatattggcccagtgttcacgttcaccgagggttgaactcgcctcattacttaaaaacgtaaacaaaatgaaagcgtgaacatccaagcgaacacgcaaagttgaatcgcaagctggatggcattcagtggtgcctatccagaaaacgtcaggttcgactaatgaatggattcttcgtctgggacagactcaaccgagcagaatgagctagtaaattgctggtcggtggctaccgagacgaagacgagatggaatagctcgccgacgtgagccactatcaggatggcaggagggagagagacgaagaaggcacgacagcctgctcccaaatcatagtgcgagaaatcgagttgacgagacgaacgtacatgtcctcctgcgtattgtactccgtgcgtgcgatgaacttgaccagacacccaggctccccggtgttgccgtcctcttcagcagaaaattccacccagttggagttatcgacgtactcaaagttcgagtccctctcggccgtcgcgcgaacttcaggtgacgtggggttcacggagtgacggcctattacgaagcccttgtccgtttgcatgcggaagttcaggaaaatcactcgcatgaccttgtcgtgttgcacggggtgctcaatatccgagccagcgatgtacgtgctgtcgttgatgacctgcaagatctcaaagcgcagttggcggcggaacggtgtcgactcgggcttggcgtacctcgtccagctgcccatcatggcttcctgcggtgtgatgccagcaaaaaacttggagaagctcacgtaaaagtccccatctggattcgcttcatgacgaacttcccacccgaacgtcgctgagggcgggaacacgcagtgcctgcctttacttgggcgtgccggagtgccaggagaagtcggagagctcggggattcggcttccgatgtgtcgccatccgggacctcgtagtgcgagaccaccgtctcctccatcagccgcatttgctggtagcagttgcgtatgtgttcgttcgcctggtcctccgtcatgcggatatattcaaagtccgagtacagcgtcgagtcgtccgtggtgagcgggcactgcagctccagctcctgcttgcgatccaccatcacctgctggaatcgtcggtgggtcttgtgcttctccacgagcatttgctccagcaaaaacttctcctccttgagcgtatgcgataaatccgccagcgcataataatccgcctccagcgccaaagcactgctgctgttgttgctattgctgctgctcgcgcgtcgacgtctcgcttgcgacttctcgttcagctcctggtagtgtttctccagctgctggagcgtgcacttcatccgctccacgtcgtctcgctggcgacgtcttgcacgctgcatggactctcgattgcgtttgcggcggatctccagcggcgtgaacttcacttcctgcttcgctattgccgcagccgcggggactttcgctgctgcgggtttccgtttgcgttgcaccttgggcgtcttcttgcttgcgtccttcttgccggcttcaaccttctgctccggagactttattgatacctttgcctttggcgccttttgtttgctcttgtttgagtttctagtcacacgagttgccgttgccgttggcgttgctgaggccgtgggagcgatgacgttagcctccgactccgtttgcgaatcatccgacacttcaacttgtctggcagcggtggcgagcgcattgctcataacgttggcttccagtttagtgcgcgtctgcttcgcctcgatggccacgggcgagatggtctctctcgcgcgcgacggctccacgaaggccgcgagcgctgcctcctgctcggtcagcagcagatccacggggcccaggccttcgttcggcttcttgtccgctgcgctggcctcagtgagcgtcaggtcccaccaggcggcggcggcctgggcccctccgccgccctgcgcctccaggtcgccccagacgcccgccatggcgtcgtctggctcgccgcgcgcctgcgcgtcgcttgcggtcgagtcgtccagcaggaagtcggcgtcctctgctgccaacagctcgaggtccaccgccatgagcgaacgtaggagaccggcttagtgcgagaagttcgctcgacagcgataaagcaagaataaccgagaggccaccttctgcgagggatttgacgcaatggggatgggctcatcacctcgtggtgtaacgtttgtgtggcacgcgcatgaatgatggtcggtacaaaattattgggaaaacgtcaaaaagtgtatgaatttgaaacgttttgtcaaaagcggttaactcgtgccattaggtgtatgctaggttgtcggtatgacagtatgtgtatgtggttccaagcgcactaaggtgcatgataaagctgcatcagcaacaaatgcggtgactggtgtgtgggcttggatccaaatccataaaacccggggtgaggaaggcttctacctgatgcaactagcccggttcgtggtgtccatgactttgatagcgaattgtacggctgagggactacaatgaacgtcgttatccattgtagccaggcctcagcgttgccgcagttctacaatacctacactctcttccggttgggggctctcactagagctccttcacctctgaaattcagatgcaaaacctacctagtacagccatgctatagacgcttgcggtttgcgttggtagttccttgtagccacaatagcgaagttgtcgagtacagttgctctatatgctattattagttgaccgtgttcgctacgagcgtgtcgttaataaactattgtgcttggaagctcgatcctgggtctgtatgacccgacctcggccgaaataccgcggcaaccaaaacgtgtgtcagtacgtgtatgatgagacatgacgcgacgtgacgcccacgaccactacacctattgacaaacgttttcccaacgcatacaccttttgacgttttcccaaaattattggtttcaaatgctgtacagggttcactgtattgccattttgctgatgctgtgggaatacgtggcaggttaatatgcgggccgatgggaggcagacactctgagtgctaggaactcttagcacacacaagcgcctcgctgggaggatgaatgcagtgcaccgcctgcaggcccgcttcagtttggctacagtctcttcggcctgtctgtggctgtggtacggggaaggagtcaacggctggccgactgaccgacagaccgacaaacagaccaaggccgccttgaaggtgacgccgacaatttggaggcaagttcgtctacgatacgtgtacacggcggtgctccgcagtgacaataaccacaccttcgcagaggaggcatttggacgctggacgagggcgccttgttgccaacctttctcgatgctcgatgcccgatttgaagcggacgttttaccgcgcttatcagtcagggatgcagcgaatacatgtacggagccagatcccgcggacgtcaccacaccacgtcgaccaatacagaggtcgctcgacatgcaaaagcgaggattcctcgcttttgaggaacatttgtagtgtacggaagttttacggagtctgtactaaactgatgggatcgacaacgcagaagtggaaacacattatccatttctgcgaaaaaaaaacaagctttccgaaagtgtacggtactacgactcgttaaagtaaaaaaaaaagcgtactgcagttccgctggaataaaacgtcggatagctctatccactggaaccgactcacccgctggaacgagcaatccactgtttcgttttgcagtgcgcgattttgctgtccagcggatcgctattttacacggtcaaatatcgtaaacagagcgtgcatcagaagcaaacgtgtattgagttgtggagggggccgtatttgagatctcatacttcatacaccatattcttgaaattgtgttgttgtattttgtctttgcaccatttcaccctttttgtgcgtatttttggatctgtcttgccaaaactggccatattatggccagttttggcaagaaagataatattattatggcgcaaatgcactatctctccgctctgaattgtgagatctctctgtagtatgagatctaaaatacggtactgtcggacttggcccaaactccctttgagagtatcgacctgaatgacatgtttccttcctaccacagcggcgacagcttccattcgataactccgccaccgtgccacgtcacccctcttcgctgccttcggcattgccatcgcctccgcaagcagtatcccgcgggcagtcacagagacgcgcttgtgaatggagtccacccactctctaaaaaaagtcttcgcaaaggcgccatctgttcaattccgctggatcaatccgctgcctgcccgaattcgggcggatgaaatccgctggaatatgctcgaatttccgctagaattgcatgcagtacgcgccagcggatcggccattccgctgtaatgcaaattccgctgaaattggccccattccgctggaatttagttgtgcagtacgcacccttataacaagttatctttctaatgatacgtgcacaattgaattactcttcacatgttcttaaaaccgaaaagcttgggaaaatactacagtagtaaaaaaaatgcgaatcttacctcgcagtacttcggttcgaaagcatcctttcgctgcaaagagctctcgagaattcgagtcgagtcggacatgaacgcttcaacccagttgctgcaacagccgccgctatttgtcatatactacgtggacgtgtatgtgtatgtgccgcgttcagccatttacaatacttctgtagtacaattgataacacgcggaagaacttcacttaggtatgcattcgttcgtgttcatttccagctaggtattgtaaccacgccggtgacgactttgcattctttacgagtatcggatggccgagacagtctgctgcagcgtgtacgtctggccagcgggcagcacctgcttctcgctgacacgaccaggctcgatggcgaccatcttgaggtactcctcggggccgaagtcttccatggtcttagcgcggtcggcccacgggttccatacgacaacgtcggtcttggttgcggcgccattgatggagcccttcttctcgacctgcacggtgtagtcaaagttgacacccctgataggagcgcggatcttgactggggcgttgctgtatacgttgtcgatctgtgccgtgatgctgatcatgtcgcgagtctccgtcttgttagccttggcgaccttatcgtagtagttcacgccgttgaggtcattgaccaccacaccattgtcgcgtacgtcgttcacggcgatgtagttgtgcagcagcgcgtggaagtcgatgtccttagtgaacgtgttgtgcacgttcagggtagtttcgagctgggcggaccacagcttcacctcgtactggagctcgaagtcaacgggccacatcttgcgggtcgcctcgctggccgccatcttgaacttggccacgctgggcttggtctcatcggtggcctgcacaacgctggccagcgtccagttggtgatgcgcgcgaagccgtggctgggcaaacccgtggcgctgccgaagttcgggaacacgacggggatgccaccacgaatggggttcacgccatcgaggtgcgagcggttcgacatgaacagaatgtccatgttcgggtcgaacacgctgcggaacgacttgacgtgggcaccgaagaggaagacctcggcgctggacccggtcgggtggttgagcttcacggtttccagctccgcatcggcaccgctgagagtcgccagcacagccgaaaccaaggccgcggtcttgaacatgaaggagcacaccattgtcttgaagtcaagtttgctcccgagaaggcgagtttctaaatgacgtattagtcgtggcactgccgtggtggcagcgagagatgctggtgggccacgcacaagtggaaggctgtcccagcattgcgtttgacggcaccataatcgcagatcacggaatggatcgcgaggaaatcgggagacggatgtaatgcagcgcatgggatcacgttgtctgttcgaggatggaatttgcatactggcaaactgtattttaaagccagatgtatttttatacaactgtgggtattaattcgcatgtttgagacataccgcagcgttcgcaatgcattattacaggcacggtatgtggggaaagtcctgttgattgatcgagcctcgggcgcacgcgatatctgattgcagttggggaatggaagtggtccacttctgggactgtatgcgtatccacttcaagtggatacgcatacagtcccaaaagagtggtactatctacacctcaatacgagacagcaaggaaagcaaaacgggattgtttggatacatgtacaaattgttttgggcacaagatgaaataactaaattgggtgatttcaacgcaaatgagattaacaccagggcaaacgagatttatgctctttcgtaagacgatactggtccctagagagcataccgtaagacaaagcgtcttacgttttgcaatcaacgcattttgattacatcttgattttagtataccagtggctacattgtattttgtcactcaaaacgtaagacagtttgtcggacaccagtttgcgccatattattggtcaaaagctctacttgacgtgcagagctgcatgtgcatgctcgggcccactcaaccacggcagcggtgcggatgcaggctgtgttggtggcacctttgttcgccaagacggcgcgtaggtccgtcgacaacaggatgatattctggctgcagccacggcggccgcgccaggccttgcgtgaagccttagcgctaaggctgttctgatctgttgctcttaaaatgccacgtccagagcttttcagtgcctggatggtaacgaatagtgtcacgagggaaatattgtaggagttttcgtactgtcaggttgcaatgtacgtatcatgatgcgggcaagccttccttcaataacgtggttagttacgtagcataagaggcagcgattctagagcgcttataaccgcgccagtctattgctgtctgttaagcttgaatctacgtagtgtttccatttcggctttgttgacaagtttctagagagtgctcgagtgtacattctagtcgtttgctattcaatgcacgctcaagcacaattcagttctccgtgtaccaaccgcgtcgtgtcctccgaagggcatctccctacttacgccgactacgcggcttcatggaagagctcctcggacctcataaaatatgtataatacgcactttcatttgaaggacctggcatttagtaggtcgctagttaggccaaataactgtgatgcacttcacattactacgaaatcgaaaacgaaacaaatacacgttcatgctgccgattctgctcgtcagcacggctatccgttgctggtgcatgccacgacggcgacgcagacggcccggccaagggcatacacggacaacaccacgcataatattagccaatcacatggctaaatttgatttgtcgtcaaactgtcttacgaagaatgctcgacacaagtgattgcgtgtcgctggcctttatgtctacgccccattctatgtcgatgtcgtcagcttcttcgttcaaaggcaggtcagtggccaggacccaatcccggcgttgctacaaatttgccagtccaatacaagatggtgccagagcaatgcgagatagatgaaatattaccaggtaatttacccaatctagatatattacataatttatatcactggctatggagcaagcgagattagctccagggcatccgagacgagcgcaccattccccaatctaccgcgccccacgccgaccgcatgtccgagtcgccgagagctctggctttgccgtcgccgtcgctgccgcggcgcactgccactgaagaagaatgctagtgtgtgctggatgcgttcgcggctggcgacgactggctcaccgtggcgaaatacaacaacgtctcgcgggcggcggcgcacaggctgtgcaagaaaggagatcccagcccgcctccgagaggcggtgcccgcgccagctgcgtcaagtgcacggacgcaatggttgaggcgctggagggctacttagacgaggactgcacgtcgacgctcgtccagttgtgagacaagctcatggagcacttcgcggtcgacgtctccacgtccacgattagtgcgaagcttgctggcaaacttatgacgttaaaacaggttgtgtatactgtacggtaattgctacacgtgtaattagcgtcttcaaggcgaaagtaaaggcgtacctgtcggagcaccgacagcggatgttcgaacggggttcgcatcgaagcatgacggaggcaaggatgcgcttacttgaggacgctgccaactcctcgatcggctgcatgaatcgacacttagtggtctcaatggggctgcactgccagcgcgccgtcgcggacgcgttgaagatggaggacatgcacgccgattgaagctgtggatccttcccggctttcagatcggccagcacctgcttcagaaatatttgcagattgatctgggctcgagtcccccacagacagccgacttccgcaatttccttgccaatcgagagcagctctttgtacttttcactctgggacttggctcgggagggcggagagcgtgcaacagacggcatgctgaacgactcgacgtcgtgaagacttgcagcatcagccctcgtgataccgcgaaaattcttgatcaaccaacgccgctgaatgatcgaggtcggtatcaactcacgaaattgttcaaggtagatgccgcgtgacgttaaaaatgcacgagcacgtccactcaacagggtttagcgtgtactcgtcaggtgcatcaactgaaaattggtccagtgcgtctgcagaatcggcgtgtcgaagtagatcatcacgtatggagggagtcggtagtgcacgtagcgtgttgtcggccgtagtacaaagtcatactgctgtttaacttgcgcaacagcgtggtccgacatgacgttcgccaacgccgccatctccttgtcatactgactgttgtgatagacaccaatgcgattcagcttccgccgccattctctctcctgaacggactgccagaacaggatagatgccacgcagtcgtctacgcctgagggggagctatcaaccagagttttcaatttctgccagctcgactccagcctatgcataaccacacaacaggaacatacaacaagattcttaggcaccataccaatacagccacgatgaatcgctcacgcaccggttattcgtttggttccctaagtgtgggatgttgccgcgatatatggagctccacatctccttacaggtgctccagttctcatcaaacatattaaaccagcgttcaattagcacgggatctcgcagaaccaccttcatcgtcttcagcacttggtcgtacttcttctccatcggggcgctaaccagcaagctagccaatcttttgatctcattcttctgaaatgtatccaaccggtacctttccttagatacttcgcgttgaagacactggactacgtggaagtggcacaggagcaagcggacacctgggaattcttcggccaacacggaaatttccgtaaagtccttgtctatgatgatcacagcaattgactcatgctcggggcagctttgcttgaactgcatgcatgcttcccgaagcgtctccttttgctcattttcgacgagactgtgctgtttacattgcgacagttgaagattgtaagtacaaccccagactggcatacaatccaagcccagtcaagatatttagataaaactaaaaacccatctgcacgtattgaccctttccaaaggcgtcgtgcaccataaaagagaagagcttgtagtgggcggagttggtcttgtaggtagcgtcaatgaggagtacctccgggaaatagctaaacatttgacgcatgtgagccgtttgcatgaagatgcagagcgccttaccctgtaatacgtgcacaaccattaagcataagtaaattagcacccaaaagaccacaaataagatataattacctccttgatgatgattctggatacgtttccggtttcttgagcgaagtcttccagaaatgcttgaacccgctcctccactgtcggaaaagcgtagtcgtcctcctgtagccgcgctagcagattatgcacgtctctcattgtcggttcgacgaccgtattctctaatatatactgcagaattctcttccggtttgcaccgctgcgacgaagcgtctgcaccgtggatattacttcttcatcttcgatgcgtcggttctcgtgataggtcttgaagatgttagggcctacttcgtggttgtgctgggcaacttgacgagtaacacagacctcccagtcttcgtcattctgctgcacacacgcgtttatctaaaatagaagaaatgttagaaatgaccaggcggaaaaaaatacatcattgtcagtaacaatacgcacctgggcgggacacccgattttgcgagagcgctggtttggtcggcttcctgtacgcggtcttgccatggattcgagcggatcgtcgctgtgcgtgcactgatacgtcgcattatagaaactgaaggaatctggaacgaagtcactgtttccaccatttgccttaatccgcttgttccgcgttgatacgggtgttgaagtccggtgtgtaaaaagctgggattacacacaagcaaaataattccttttgtacgataatcttccatgtggctgtaaataatttgcaaaaaaacaaacctaaagtgtgcgcttcgcgtagatctgaaaatactcttcgaaagccagagatgacgcgaattttcgcacgtccatccttggcactgacactaagtcgtctagagacagcattgactctggcgacggttgttttcatatcctttcgtttctgctcgttctgcttcgcccgcgagcctttagccgcactaggtcggctcgctgttttggacaacttccactccagctcatcttgtgcctgagctcgaacagattgtagtccgttttcagactgtctgacagtctgagttgctgccggtcgctgctcttcgacgtcgacaagcgagttcgctttttcaccctctctcagtgccagagaggcctgtgtcactcaagggccctacgtattttacgaagcagcgatgagggctctacaagttcgccagataaagcgatcttccattaaggtatctgcgacggcagatgaaaagcgcccggcagcaaatgaccgggtgacgtcggtgctcgctatggtaacgcttgcggcgtgctcaatgcagattactagattccaaaatgcatgggtatctgacgacgactctagaatcacaagagaagacattgtcgtgactgtcaacggcgtttcttacgaagcacgcgctattgaggacatgaagaagtggcacatgatgatccaaaggtttgccgacatcgatgcggcagtagagtgggcactcggtattacctggcagcctgaggtgatatccatcgccaaggacgaacctatcatggagccgagacaagctgcactgcggttgaagatgattcgagtgctgcatgccgattacttcctcacgacattttgtgggaagcaggatattgaagaggaatgtctggaccgcgcgacgcgtcgaatgattcggctgcaccgaggaaggtgcaaggctatttcgattcctgctaatgtgttgagtctaccgcactatctcccagagcgcctaccagtctaagatgcgtttcatgtgctgtcgagcgagcgcctccctttgctgctgatagcggtgaacgtcgatgggaatcattggtgtgcgctggtagccaacgtgtcggcgggcatcgttacagtatttgatccgcagcaatgtcgtgacaggattaagcagctaaaagctgttgccgtcaaggagatattcccactcctaccagggcgcgagactggatacaagtttgctgtctttccgtcgatgacccaagtcgacaactacaattgcggcctattcgtcctcatcttcttcgaagctatgctatccggttcatcggtaagtgacatcgatgacgacgacgacagaaaggagttaatgcagctcttcaggtacaaatacttgtgctactcactctcgaacagcgtgtaacccagcgatcaacaaggctggcacagaattcagtcataatccaagtcgcgttaagacgctgagcacgagataatgacttcgaggtaaaacaacgatttcgaaacacacgtatcgtgcataactttgttgtagtaactacactgtagtaacgcaataggccagcgagtttccggaatgtagcaaagagacccggaggatgtactccgaaattcaacacccgtcaacggagccagcgcaccaacattatcgcagcaaagaagtctgtgaagcttccggccgtccaccggcagcaactccacaccgcgtccagggtctcgccagcctacacgacgctctgcgtctggtccgcgcctgggagctccacgctcagcagctccgccgcctcctcaatgaagcagcaggttgtcacctggaacggcagccagcgtcgcgcctctttgaccttgtacacgccgacgtccagctttcaggtcttgaggcggtccacgagcacccgcaacacgcgcagaatcgacagcaaactctcgcccagactcaccagcaccgccacgacttgcttgtttactgcgaccgctgcccacgtactagatggccagacggctgagcaactacaggcggtggcagctccgacgccgctgcaaccggcagcgccgcctctagttgctcgacgaggtgctggctgggtagatgcattgacggtaatagcgagcagcttctcgcgtagctgcccgacgcggcatcatccagaacagtcggtaagcgagctgcagaaagctgcccggccgttgctgatctggttcgcgtcctgtagcgcgtggtgagtcgagttcgcccttgagtggtgctggcaccttgagtgtcatgccgcggtcgtacaggcagttggcgctaccgttcgcgcacacgtgggcattccggacgagctcatagcgatgccactgctgcgtgtcttcgattctggttcactacttgtacttcgtttcatcgtcatcttcctgggacgctcctgcgaggaagcccttgaggggagctgcggacccacatacttagtccaaaatgacgtggctatcacgcacagtttttctgcctgacacacattctgcaatggacacgctatgtgcaattatgagcgtcctatgtgtaccatatgtagatctttacctgcatacagacccagacaaccgaggactgtatgaataacaaacagtctcgcgctttctcttgcggagactgtatgcgtatcccctgccgttggggaatacagtaggagagtctctattaccacaatctgagatgacttagaatttgtatgtggatgacaattcgtacttagtatatatatataactcgggagggggtgaaaccaactcgctcggcagccgaaacaacgcctgcggtttaagatccgtgtgcagagcacgcgggcttaaacccaggaccaagcatggtcacatctcgctcggcccgttcgggttaagccctgcaaggaagggtttttgggtttaggctggggaacagtttgctaccggcccctacaattttcatgatatgaagcagggtgacacccgttccccagattgtggcaatagtctctgccaatacaaaactaccaaactaatggttgaggtttacgtcgtacagatacgtagcggcaatcatgggctcattgagctgtgacggcattagcgattgcggtgtacagtttaccataaccgcttcgcaacttgagaccactacttctcactgcaacccaaagggcaaattcgagctaatcaagtcggatagagagatttcgaggtggtcgtcaccaggactaaaaaatggcttgatgtacaatgctaggttacgtccacgaaatgtggactatattttgatcaaagatttgttttcacgtacagagtcagtctactcacagcatacttctgacgagaacggtagaatggcacagacaagacagattagctttacagatgaaacatgtagtcacacacattgatcaggagccccacagataaatttgttgggacgggtaaatccacagattgtagcgagaaaagcacagatgcagtcctgaaaaaatgttgccaacataaaaaaacgggtgcactgcctataataggacttcgctttccgcaccagccatcatcattccgggcccgtcgtcacagcgctagccgactaacaaacccaccacagaccgcacggggcgtgacagcggcaaggccagtagagcgcccagcgaagccgacaacgagtgcctaaagcacagcagagcgagcggtgacagcgcgagaccggtgacgagccatcgacatcacgatgcaccggcctaagtataattgggaagagctttgtacgctggacactgttgaagctgccgatgagtttgtagagggagaattttgctgctctagtgacacacacggatccgacccgaggatgtatgatatggtagggggaagaacatgttatgaccgaacgacgactggagtgcacgagcaaaacgtgcaaagtgtttggttcctgcaaggtgaaatggaaaatctggcgatgcgatgactcgaagcgtacgacaattttttacaactcggtagaccacatccgtggtgactccgtctagtgtgatggtcctcataaaaccgtgataacaactgagacgaagaagttcattctccaacaagacgagtgtggtatttctccgcagcttattctcagcaacatgcgccatgtctccgacatcatcgagccaaaacgaggatatccttccctcagccaggtgacaaaactgcgctaaatatttgaggcggctgaaaggaacaaaaaactcggtgcacgctgtgaagcaactcatgcgagagcattaccggagacctaaagaaagccttcttctttggagggcgcgaggatacagatggatatgcgtacgtcgggaaaggaacagatgatgattctttcgttattggccacaagtcttgcactagtcaatgcaacgatcaattacgcttcggctagtcgttttacgctgtttcacgccgatgctacgtttaagttgagcgatcttgggtacccaataattacgtgtggcttctccgacgcatctcgatcttaccagctacctgccatatttgttgccagtcaccggacagccaccgagtactcgatgtgcctgcgagcactaactcgattgatcaagcaagttcgcccaacggcctccctccacattgatgcagtaatgggagatgcagaggatgcacaactgaacggcttccaacaggttgctgagttttcctctgcgacgtacctgatgtgttttttttcacgtgctgtacaatgttcgaaaacgaactcggcatttgtcaccgaagcaccgccgagcggtgacagatggattactgctgatccacgatgctaccaacatggatacgtactactcggcaaaggacgatgtgatcaaggattggcaagatatcccccacttgaagcgttcgtagcctattttaaggctcaatggctcgacagcagatattggtggtggcagatctttcatacgcctagcggctacgcaataacgaacaatccatgtgagacattcaacgctttgctcaagcgatatactggtcgacggcgatactacatgcagcgtctactacggattagccagattgttgtccacgacgctgaatcacgaacgccagcggctgaaaatcatatccagcaacccgctccattcatgagtcgagcggcatcttcaatggtcaccatggcgcgcatcgttgttcacgtaccgaaaatcccagcctgtgcagggtcaagcaatttcagaaagacgaggtaaccgaggcgacggagctagaatctctgtgctcagcgttagacattcccttcaaggccgccgttgaagccgaaaatgagcaggaggagcctgaccatttgattctggggccagccttactagtaagagagcaacgagcgcgcgcagcacagctctataagagcgtggtgacatggtcgctaaagttcaagatcttcaaggcagcaatggagaacgcaacgggcaagacgatcaagcgcctgctgtcggacaatgggtgccttccaaaacctacataaaacggtttaatgcgactccgtttaatacacccttttatccgcccttggtcacgttttatcccgcattaaaaagatgcaccgaaatccaacgcccaaaaccctatttaactggttaatgtgtccgggtaaaactgcccagatgactacaataatgtatagtatcacaatggaacaaattttgacaggacaattttaaaacattttttcaatatatcaagatctcattaggcgcgaaaagcatcaccactcctgtcagcaactccctctcgtcgctccatttacaagtccttcgaacgctggcattcttcctggaatagaagaaagatgcaagacgcccagactgccgtggttctcttcttagtgtcccggatgcagcgtagggcagctgtggccaacgcggtcctactaaatcttcgccgtcgacagcacgaagaggtcatgcgggtggaacacgcgcgtatcgtccgcatacgaaactatcatactgtgtcttgcctaccaagaccgtacttagcgccctggatgtggatttgatattttggaaatgacatgaacttcatcaatcaggtaattttgtccaggtacgagctagactcctcttcaattaggtccagctgcccatcgacaagagttccctcggtgttgagcgtccgtgtcgtgctctgcgtctggctccgtgttggccaccgtaccgaactcggtgtcgtgctccgcgtcgtgttccgtgccaaactcggtgtcgtgctccgcgtctggctccgggtcgggcccttctcgcttatgcgaagggctcatgtttgacactgtatctagtctaaatgcagggtcgaaacaagaaaggaagttagcaatgaaatgtaagaaaacatcgcccctcatacgcaccgatgctgtcaggcgtagtttgattgatacggcagtccgagatcaagcttctcccggccgaaacacacctgcaagcatgcagcacatcgtttagaggctgaaagagactcacctaggcaaggagactcgccgccgaaagccaacgagggtgttgaggttgtctgcttctacggcgtagctactaaacatcttgcatgtaagtaggtagactccgtttaccacaaccattcaagaaagcgagtgacgcaccggtcaacttccgcaggacggcagcacttgcgctacagccggtgaatctggatatgagagcctcgttgcgcgcggaagggagcggtagcccacgccatgtcgttgaacttcaatttgctatatagaggttgtgtttgatcgcatagtgaatacaagtgtctttttaatgcggttgcaagttggggggcagatacaacctgataaaagggtgaccaaataattgtttgacccgacatttttttgatcggaccaaagaaattaagtttaatcagcaagtttaatgacccctttaatgcgccctaaccccagtgattaaactttttatgtaggttttggaaggcacccaatggcggcgagtacacgggcaagcagttcaaggcctacctcgaccgcagcggcatcaaacatgagaagacggtgccgtacacgcctcagcagaatggactgtctgagcgcatgaatcgaagtttggtggagatcgcgcgctgcatgctctaccatgaagggatcgacaagaagtgtgggcgaaatctgtcaacacggcggcctggatcatgaaccggatcccaaattctgtgaccgtgaagacaccccacgatatcgtgcaccgtgctaagcctttgctcaaaaacatgaaggtgcttggtgtacttggctacgcccacattgctgaagaaaaacgccgaatgctcgacgcgaaggctttcaagtatcgtttcctgggttacgaagatggtgtgaaggaataccgcgttctcaacgtggcgacggggaaggtgcaaatcgtgcgcaccgtgaagttcatggagacgactgaacccgaccacttgatgacacgtctggagatcgacgacgatgaagaaccggttgttacggaccccagctctggaacggtacctgcactggtgcctattcgtgatgtttcgactgaagttgaagttggtggcccgactatgtcacctagtgacgtgacgacaggtggagcaatcgttccgtatcctacccatcttatgattactcgatcgcgtgctcgtcgtattgaagagaccaacgaccctgaagagcccggagctcgcaagaagcaagtcgttgcgccatccgagatcagggcgaagcgtcagaaggtggaccaaggtcgcgccaagtcggacgagaaccaactcactatccacggtgggatgctgatggctgcaacggaagatgcaccaagggcgtaccaagaagcgattacgagcgaggatcgtgcccaatggaaggcagcgattgcaagtgagctcaagtcgctgatgacgaacaagacatggaaggtggtgccgagacccaagtgtggtgtagcgggatcagcaaaatctgcgagattgccaatccaacttcccaactgcgcccgaacaccgacttacggagggggtcccccgatgatccgtgatctgtgtgctgaacttggtcaccttgtgtacccgtcggtagggctggatcttgctcctctggtgtcttccgaagcgtccgagccttgacgagagaacagtctgggcgagacgcggggatgtgggtggagcagcgtggaaatcttcactctgctcgcggtagtattccaaatccagtagtcttgtacttagatctggcggcctggatctggatccggccgggttgttgccttttgaggttgttgtcctttacgttgccttcacaggtcttccttggtcgtgtttgccgcctccaatgacggtgtcgttgacagttgagacgagaaggacgcaccggccaaacagataactccggtggatcttggatctgcacttgcaggtagttcacgaggaaggtcttggacctggccaatatattactccagtcttacaaccaacactagatctgctatcgctaacctctctacgccgtgtaggaccaatgtcgttcccgtttccaggcgagggaggaagcgcttgcgatgtacaaggcaaattctggtctgatttatgcttaagttcgttcctatcccaaagtcctattgccatgtggctcctatcatccgatcggttcctaccgactctatggactccctttaccttcattgcgtgtcagctgcttgcccgtagggtcgtgtccacagcctcttgattacgcctggatcttggatcttggatctctgtcgacgtagatcccgatccatctgagtccggatccagctccatctgattcatggatcttggatcttggatctccgtgggcgtagatccagattcatctggatccatctgggcctgtcactattccgcatctgtggcgaggtccagatccatcaatcgtccaattacttgccatcactgaatcttgggacttgcgcttctccacaatcgcctcctgaccgtagttgctgccgactaacggcatcactaccggcacagttacccacttcttcgcctccccagcttcgctgacatgtccggctccggtcgcagcccttctcgcggctcgtcagcgtgcagcgatcgtcacacggatcggtcttcgccggatccacccagtccagatcctcgcgatcctcgcggggaggaactgcgcgctctgatcgcctcctgtgatgctgcagttcgcaactaagaagaggtcgccgctttactgctgcaccagacgggggagctggacgcgactcaagcgtacatacagcagcagaacgcagaactgagcagcttgcgatcggaagtcgcagtccgtcgcagccgagaaactacttctgtagctggggtagcgcgggctctccaactccagggccaggtcgactaacaggtgaacgagatccgggatctccagcgtcacatcgagcagattgagcgtgagcgggatcgcttgcaggagaacaacgaccatctgacttccgaggtcagtttggccgccaccgagatccagcagcttcaggatcgaaacaccgacctagatcgcgctttggatgacgccaactacgagcgggacatagctgagcacaacatggatcgagtccaggaggagctcctaagggtcgaggccgagctccaaacaggagatcaaattacttcggcggatctgcaacagattgcgaccctgacgcagaaacgggatcgcgctcacgcatcattggccgaagtcacgcggaatttcatgaaggcgcgagaagacctgcttgcccaccagcggatgcacacggaggctcgtgacgagctgaatcgcctgcgagctacccacagagctaccatggcggctctggatcaagctgtgcgggaacgtgacaacccggagctaactcgtctgcgggatctccaggagacgactgtcgcggatctggcgcaggtatgcccggagcgggacgcccttcaaggtgaagtgaaccaagttcgttcggagttcaatgatctcaaatccgacttcgatgcgtccgaacagaccgtaactacaatggggcgtcggatccaggcgatcgaatctgagagtcggtcgctgacgcaggatctgatccggatgagccatgagcgggacgtgctacagctggagctctcagtcgcgcgttggcagctgacctccatcaccactctggcgagagcgcgacctggcgcaatcgaagaggttctggatccggcctacatcctcagcttgatccgtattgcgccccccggatctgccgagcagcagcctgccggcaaaacttccgaccccgctcagcgggatcccgatccagaggcgaatccagagttgagtcggcaaatagactccggcacttcgaaacgggatcgtggcccggagactcccgatccagatctaactccggccgtcaagcgtcgcatcttctcgccgccctccgagcacgatgaagctatggaccaggagggtagtcgcgcagcttccggctctgccacagagggataaatcgacgacgatgggggcggtaaccaggaggatcgccatgaccctgagaagaaacgtcacgaagaatttgaggagaaaggcggcgacaacccggaagagaaagatgatgacgaccaggaggaggacgacgacgacgaccaagaggaggatgacggcgaccaagaggacggcaacgaccatgaggaaggagaggatgacgaacaccacgaggcgagtgaggagaccaacgacgacgacgcagagactgagatcatggcgaatgagctgtttgaagcccagactcgagaggcgttatctcggtcgcgatccgacgagagacggcgacagcacgcctatcctcgtcgccaactgctttcgagcgctggtggtgcccctgacgatgatgatggattggatccgcatgaagatcccgatccaactgccccgcaagatcccgatccacgcagtctccgtccggatcgtgcccgtcgaccacctgtgcaagaccctctggctcctgttgttccattcgcgccggactctgactgcatcccaggtcgtgagcatgcacatatgttggttttggccgactgtcacccttggctggtggatcgcctgaacgacgtggccatggtatctatgctggtcgacgtattgttcccgatcctgcccgctgcttcaggctgattatttccatacttcggtcctgctcagggccgtaagccgaaaatccaactcagttactgctgctgggagctcatcacagaagagaacgtgcgggcgctattggacaccacccttgggaaatcctcgagaactcgggagatgccatctcgtttgaagtcaacgtgggtggtcgacttgggatcctgatccatgagtacgggatcttcgaagacactaatatcatgtcctactgggagtcgacccaccacttcccgattcccgatgcgatggcaaagaaatacccgtggctgatagtgtttcagaaggaacgcagtaaccgtagatcccacgcgggccgtgcgtggaagcagttcttggagttgttgatcaccgtcatgcgtgaagggtggtgtgacctggacatcctgctggatccacattttctgcatttccccaagcgcgccgagtccgtcacgtggtacccagggttggcctcgcgccaggctaatttggtggatcgtaacttgaaccggccagagcccacggatctcatgaaggcgttgaatgagtgtaacaacgaggatccatggtgcaatcactaccgggatactccccaataccatcctgcgcgcaacatcgcgcgtcttcctgccaaatttttcaatcttcgcgcggttggtgaccagtaggatccagatccagggcggcagccttcgtgtagattcagatccaaaccttttgatggttggccagattcgttggcgctggatccgcacccggtacatcgagactggtcttaatacattctactcgtctgtctatcgttcatgttagtttcgtctcttctactgcgatccagacccgcattcacactccaatccagcttcacctcccgatcccaaacacctccagcttcgttttaattccaccttgtcggacaccactcgcgtccgattatttcatgcacatatacagagtctccaatccatcgatctgcaagctccttgcagatccatcaccacattctcctcccaaagcggccagcccactccggggggttccggcctcactgctcttcgtgagactgcatcgcaccgaaccggttccggttggtgcgactccgcaggaactcatgtagtatagatccgcagttgagatccgcctcatccacccaggatggatcttcgtatccacgccagtgtaccagaaattcacggtggatccggccgtacctagcgcgctttccagtcctcatatcagtaattttctccacttcgttctcatcttcacctcgatcctggatccagctgtcctccggcagtagtgcttcatcaaagtcgtatcgctccgtagtgccttcggtcaactggatctgaggtcggtctgggaaattcctcacaagcttcaacttggaaacatgcaccacggggaacaaccggtactccgtgccaggggtctcgatccgcacagcgtattctcccatcttctccgccacgcggaacggaccgtgccacatatgagccaacttgcgagcatatccctctttcacccgatccaaatacagacaaactctggatccaacttcaatctggtgcggacggatctcttcattgtgccggtccgcccgatccgagatcgcctcttgcagtcgcgcgttgacttctgaccgtgcctgctgataatagcgttggatctggtatcgccaccgcctcggatcccgatcctgacggcgagtgctgcccaccgcgatcgtagcctcgagcgtggatctaggatcccagccatgtaccaagtagaatggcgtctctcctcggatccgatcctgggcggtattgagtgcgaaggtgagacgctcagcgtagtcgtcccaatcgcgctgatccagatcctgcacgtacatcttcagagcgcgggtggcaccatgcgctcagcggttccgtttgcttgcggcctgtacgccatcgtcgcacgttgtcgctgaccaaggatcttgttgaaggatctaaagaagtcggccatgaaccccggctcgcggtcgtggcgaatcacgtcgctggcaccaaatcgtctgaatacacactcttcgtaggattccgcgatcgtctgcgccgtcctggagtcgctggccttcgcgatcacgtacccagtgagcagatccacccagatcagtaactcggtattacctttgttggatctgggcagcgacggtatgtgatccatcgctataatctgaaacgggtacgtggcttggatgttaccgggcgactcaccttggatcgcaggtcgccctttgccggtttcacaatccacgcattctccgatgtatcgctgtacactccgatataatcctctccaatggaagcgatcccggacccgctggtaggtgcggccgatcccttggtgacctccttcgagactgacatggtaatggtggagaacatcctgttgtagagtctccggcagcaccagcctcatcaatccatcgcgatccgcctccgccttcttcgcaggaggactagaacagcaagtcgttgatctccactttgtaatccatcgtgacagcactataggatctagcctcatcttgggtcagatcctgcatatcgcctgctaagtacttcttcagaccggagatccacgcctcctcgtcctgcgcttggcgaatcctagcgatcctgaggtcccgcactgcttcctcccgtaacacagtcgggctggatctggatctggcggatccgtttatcacaggtgatacacgagcgacgggagcatcttcctcactcttcacaaccaggatctcctccagtcgattcagcgtgactacatcctgcagatccaccgcatcctccaccatgataccggcctgccgctgaagtgctgcgctggctaggctatcagcgctaccgttccagtcgcgcttgacatgtaccagctcatgatctggccagatccgcagcctatccagggccttctgtctcggaagggttaatcccggtgccttgcagtcgatctcgcctgggacttggcaaactaccaaaacgaggtctgccccgttggatctggagccgtcgaagccatcaccgcttggatccggcctcgattctcaggcttgcttatcgcggcgtagtccacttcacgtaattcgtagagaaccgcagcgtagatcgcgtagtcctccagaaaccgactgtagtaattcaaactacccaggaatgactgcatggatctaggggtgtctggaaagggtagatccgttagtgccgagagatccttgggattcgcctctagtccagcatttgacacgcgatgaccgaggtactccaccttactcttgccccagaagctcttcaccacgctgattgagagattccacttatcgcacgcgtccagtagcgcgtccacacgctcacacagatggtcccaggatccaccagttaccaaaatgtcgtcaatgtacgaccgtcgtccaagcacggatggtttgcctgaacgttcaggttctcccaacttcagatccagatccagcacctccgatacagatctacgcttgaattcatgttcgcgctccgatccagatccatcttctggccgcgggatcagagtgaatccatacagcgcgttgtccagcatacgttgatagatctggggtgcattcttcaatccaaagggcattcggttccactcgtacagcccgaagggggtgatgaaggcggagatcgcacgagcccgagccgtcatcgtcaccacccagaatccactggccatatccaaagagcagtaccaaagcaccttgtccagatcctcaagcaggtcgttggtcaggggcatcgggtagaccatcagccgggtcagactgttaaccagccggtaatcaatacataatcgtatgtataccccattcttcttgatgatcaccacaattggagatgccctcggtgaagtcgaatccttgatgatcttggctctgagcaaccccttgatcagatccgacagcttctcatggtactgcggggctaccttgcgcacccgctgagcaataagttttgcatcacccacatcaatgtcacacacaactcctcctgccgcgggtggcagcgcgttgcctttgccaatcaacaggtgccggcgcctccagatccgccgtcgaagtcaatcgatctcttccgccgtattaacctctggatctcccacctggatgtcttcaatagtcacctcgtctgtggtcgcagtgacttccggtagcaccgccatctccgcttcaacatcttccgcgtgcagatccccactcacgtggtagcagacttgctcatctgcatcagcgtcactgcgacttggttctatggtagtcgttggatctgcatcgacagttggatctggcgtcggacctgattcctgcaccgtctctccatctggatctgcacattgttccatctcatcatgcgaaacttgaagcaccactggatccatgacctgtcccgtagcaccatctgtcgaatctgcagatccgccccctgtccctccgtgattaccacccgatgtgacaacggactggaccgcctgtcccacatcatctggacccagcgccccctcgcgaccgacgatggtgtcaaaatatacagatttgtaggcacaaatatacgtacatggggcgtgaatataaatatgggtttgcaccatacagttggagtgacaacagggagagactatatttgtggggcaccaatataaccgctaaccactgtgaggcatataaatatcagcttaattgtgctggccaagttaccacacgggcggctgcagacaaaggttttcgttcaggagcggccatggctggctggcatcagctagccgtgcacaattccacgggggaattcgatgactaccgtgacgagtcgatgtgctgctcggcgatatttcacaaggtcgactttgacaattgccgtgtttgtgctggtgaacatacgatgacagaaagacgtcttcggtgcttgagcagcacttgtcgcgagtttggcaaatgtggcgtggtctggaaggtgttctactgcacagctcaggacaagtggcagataactgtaaacgagcaggcacatgcccgtggtgttcttccctgtactgcggagcatcggccagtcgtgactcagccgatgaaagcatttatcgcagcacaagaagagattgggaacgccccacgtattattctggcacatctcaagaagcaagcaaatatcaagccatctaacggcggatggccagagctctcccagattcaaaatgcgctgaaagttcaccggcgttcgaagggcaccaaaagttcaatcaaggccgcgcatgaaatggctcgcgctcgccgctacaatccagaacttcagtcagattccgcttttctgtttggacctaagttggacacggatggctttgtttatgtggggtccggcgaggacgacgatccctttcattattggggtgacgtctctcgcacttatcgatagctgcctacggttctgccactcgggtgattttgtgcagttccatgcggatgccacgtttaaggttagcgacttgggctatccagtgataacttgcggcttcacggaccgagggcgttcataccaagttggtgcttttttcgtggtgagtcggcgcacggaacatgaatacaccgagtgcttgcgcagttttgctgacgtcgtccggcatgttcgaggagcaacacttcgttccgacgcaaccatgagcgatgctgaggatgctcaattcttggctctcgagaacgtgcccagttttgcaaatgctacgaagctgatgtgttttttcacgttatctacaatgtacgtaaacgcacacagcacctgccctttgatgataggagaaatgtgatgaacttgattgtcgacgtgcattttacgcaaagcttgttggagtttgagcgtacacgagatcgagaaatagctaattggcgcaagcagacacatctcgttgaattcgcggactacttcgagcagcagtggctaacaggccgctattggcaatggcaactgtaccacaatcctgagggctacgcattaaccaacaatccctgcgataacctaaatggaggactaaagctttttctgcagcgccgtaagcatcatatgtgtcgattactcgaaaaaatcgggaccttcatcgaaacgacgagtccagtcaagcccgcgccagcagaatatacatccacaccaacatccgatgtagtgaaggcagcggcagcaatgcttgaagcttctcgagtggttatcaccaggacaagcgatgcgaaccaagtacgagtcctcgagattctacgcgccgacacagacgaacaagctgaagaagaaaacggatttcttctggagacagtcaatacggctccctccaggcgtaccgatacggcaacatgaccgagtagccaattggctttgtttctatcattgacatccactcaagacaacccaacatcagattcgtccgatagctcgtcggcgagcgatatcccagccatactacgatctagactggattcagatggacaggaggacgacgacacggtcacgaattggaaaaggcttttcgagcaagccacatcatggtctctacggcgttcgcatcgcacaggaatgccttccgatgggtggctagttgacatcacactcaagcgatgcacctgtccctacttttcaaaaatgctgatgtgctctgaaggtctccacagggcccgttgaaaggcctgctcatgcagcaccagcgctgacagttcaagacattctattagaatagagaacactgactaggtcaaaccctctaggtgattgaatacatgtattctttgctttatcgctgcggaaatcgacgatacccacaacctaaatcgcttcctcacaaaaagtttcgatgcccttaaactctcccaaagaatcggctcgtacgattcccgatgacgatctcaccaggttcatccgctccaagctcaacacaaagcttgtacaaggcgcttttggtatcattatatcgtcgttttgcgcgtctaatccgcgccgcagcaaaccttggatcgggttgatcgtactcagggtccggttcgaactgagcggttcccattagaaccgccagtacatcgtccaggcgaagtgggacggcggaaaacgcgtcctccactgtcttatgtttgtccttgattctggtcaagacgaccgcgttctgcgcaccggccacagcagcttcgataataccgaccatattcccgccattgtaagctgcgtggattcggagatcctgctctttgatcagcactgtgtagtagttgttacgtgcgcgctccatctctgcgaatcgtgtttgtagctgagtatcatgctgtacaggctgggttggcacggctcatcagtcactcgactgctgtatcgaacacgttttggattgttcgtggaagtcggttgaacgtgttgccgcttcgtcttggccgtagccatcttgcccgtagtcgttgtggcagtagacgttgtgaccacagtcttcttggccgtagtcgtcttggccgtagtcgttttggcggtggccatcttggccgtagtcttcttggccgtagtggtcttgggcgatgttgtgccagacgtcttctttcgttgtcctgggtaagccttacgttcgtccatgatgccgtacgtagcattggggaaactggaatccggtgctgcttggattagacgtgcgcgttcctcagccccaatgtcacgccaagcgtcccaaattttatcaccgccacggccacacaagaaggttgtgtcacgcgtccgccgctccaattcaggtagagtttgacgaaagcttgcataccaacgcgcgtatcgattccccaccactggcgcgaagatccatactgcgttgtgtgcccgcatactgagtggtgtgctacgatcttctgggttggttcaaggattttgtagaatgaacgcgtgttgcagtctgacctgactaacagcgtggtaatacgacacgagtaagtaacaaacccaaggcttcatttaaaaatctctcagtcttaccgtaatgcatattgtggctaagccaatcgaggtaatacctaagacgaagacgctgtcagccaaaaatactaagggaggtatagcgcgcttcggcgcaaaaagataatccccatgatccactctgcgtcataggcttgaatttccaccgcaacattgttgtcatcgtaaatgagcttatcaccactcaaaactttgatcgcaaagcagtgcgtcactcgtagtgagctgtaggcagcgcacacgtaaactccatccgctagagcgcatttcaccaatacttccgacgcgttcttgccgttgacacctcctagcaaattgtcatcgaatacgcggatgctgatctgacttgtcttcgaactaccacaccaatcattcaggtatttgatgtagaaacgaagctctcgagtagtcagaccgtcaggcgacaagggccgaccccgctggtcgcagtactccacaaatgcaccaaagcacccggggggtgcccaaccagagttaccgagaagcgtaactgcagtctccacagcaacaactgcacattttccattcgctgacggcgaggcaccgatattgtgcacgtgtccattccttcggcaaaacacgtaaaacgacgcgtacttagacgctttccacatgtccacgaccgcacatgctttctcaaaaccgtcctccagcaagcgcttcctgggcagccatgagtcggcccaccggtatccatcaggctcatctcgccactggaccctgtaccaatacgcaagtcctaccggcatgcgatccacaattgcgtacactaatccctcgtcagtagtatcatcacggttctcgacttgcgtacaacttgagtcgtcattagaatactccgagagaccctcggtaggtcagcttccatctttcgtcttctgtaagttgaccaggtattagcgcctagatcagcacacaacggtcggcagaccggcagaattgcgctggttgctgtgcttcatcctcgtttgtgcgctgttacacacggaacatgtggagagagtattttctatgcgcgtatgttatgaaccaacaagctgtatgctgggccccagaacctgtatactggaaaccttttgtcctcgcgaccttgcgtgtcgttcgttggatcttggcccatcaatccatcgtccggtcccagcgtgtcgttgccacttggatccgcaattgggtttggatccggtgagtcttcgacctgcaggccttccccggggacttgctccctcatattctccagcagttgatctcgtgtacgcggcttggtggaggcctgaaactgcagcatcttcgctgtcccggcgttgcgtccgtcgatcgtctgatcggggggtactcagggcgctccaccaccggtccctccggggtctcgggcggtttcgcctccgcggatccagcgtccgtcatggcctgcagcgcgaggttctgccactccatgtagcggcgggatccgacggacacgtagccttggatccgcgggaatcgatctccggccagccacaccccaacttggtggttctggcgcaacgccagttctttctctccgatattcatgatctgaagataccgcactttgcctggacccttggtcaccgttggtacccaacgatcccctcgagtaacccgcagcttgtcgtgttccgatcctcgcagacgcatgggcaactctgcggactctccgatcccaagctggagatagcgatccagctttaccgactgcgctttgtgaacggcgtccgctgagctggatctggacttcgtcaggcaggcagagagtcccatcagctagatccagtcggatcccggttgggaccatatagtccataccgagaatcgcttcttggccagacagatctcctacccaaatgtcgaagaaatacaccaggtatccacccaaggtgatcttgatccgcgttctcccttccgtcgtatacacgttgtctccgataccagcgcattcttggctctgactcctgtcgatgtagcacccaaccttacgagcaaaggcggtgtccacgatggacacctcggcaccggtatctaggagtaagatagccttctcattgttgatcttgccgtggatcttggcctgccggaaccacttgcctggcgaatgttgcttccagtacgctcgagattctccaggtaggaaatacgaggactcttgatctacgatccgccggcttgccgcgacacgtcgggacctggatcccgaggtgtcttcgccttccgttggtttgaaccactgctctggatcctgctgcttccaatagccttgacgagcttctggatccaggtcaagttccactgtcgcatcggatctggagtagtcgtcggcttgccgaagacgtgagatcacagcagtacgtttcccatgaagatcacatgtattacggcgttgatcttgtcgtttgctaactggatctgtcgatgtcttgttcacaaatgcatagatgcaatacctagaacgctcgactcgtaccggattccaacccggcgagcgtcctagtttaacatcctttccgccatttctggcagcatccccgcatgcttggctggattgannnnnnnnnnnnnnnnnnnnnnnnnnnnnnnnnnnnnnnnnnnnnnnnnnnnnnnnnnnnnnnnnnnnnnnnnnnnnnnnnnnnnnnnnnnnnnnnnnnncaccacacccacggcacacgaagaggcaatggtcacctggatgacccttcttgccgcacttctcacacgtcaaccgcttccagcagccgagatgcgagtgcttcttggatccgcagtgcgtacagcggcttcggtcggatccgtcagcgtggatcttggatctctgatcgcgggaggttggatcttgctgctgccggtctagagggttccgttccagggctttcggctcttcttcgactggtttcgcatggtcgtgggaggcagacaaaaatagatcatgcggtattcgtcgcactcggagtccgatccatcgctggatccagactcggatcccgagtcaggttggatttggatcgcacgcacatatttggctggagcggccggcgcaggcgtcgctggtgccttttgtcggtacttgcgggatccatacgcggacttcttctgtcggttcttcgcctgatccaaggcacgaaggacttcttccaactcgtcagcatccggcagtcggagcaatgccagccgatccgccagatcctgatcgcccagagtctcaatgaaatggtccacatgctcgcacttctcctattgcgtgtggatcgaggtagttggcggtaccagttccgcgccgatccagacagcagatccgcgaaggtcaggcacttctcttcgtcaggtgcttgatcgcggaggaacgcagacttcaccttactgacccaagctctcgctcgatcctcgtcttgatccttgccagagaactccttcagatccgagaccgctgagatccggactcgttggatcatgtggatccggtcgcggtggtgactactgtagcgcgtgctggggccgggaagtcaatgtcgtcagggtcgaactcccagtgtcgatccggatccgacgatccagtggactccatctcgacatctcgggatccatgattctgaaccgcccccggtgccatggctggggtcaaagctccctgctccttcaagaacctgttcatagctgcctggaagaacgactccaacctgccagtcgacatgtcagatcctgatgccgtcgctgttggatccactgatggagctgactgcttcttggatcgaggctgggatcggggctgaggactcgcttcacgttggatcttggctcgggctcgtagcatcgaggcttccgatggtccaagtgacatgcatcgcggctccgaagaggcgtccgacccaagctctgcagccgagacataaggtgacgacgtccgacattctgtggatccttcttgtagtgatcttggatccgggattgggggatccggcttcggctggatttcgcctaccagcaccttcagccggttgaacagcatctccgtcgtggcacggagttggatcggatggatctcgtacatgacggatccatgatgccttggatccatcctgaaccgaggtttctggatcttcgtcctccagctccggggccttcatcttccttctcgtagcggtcttcttcgtctgggtcttgtctggatggaagatgtagggctcttgtttcactggagagtcagcaaatgcataccgatcctggccagccttggtttgttttgttagtggatcttgactttcgtcgcgatccaccggggtcctcgaagggacctgtggaggaggttgaggtttctctcctggatccatgtctggatccacctcggttccgccgacagaggtcctccttgcactctgccgatccgtggatcttgtttcattcagcagcgtcgtcgtcgatcccgattccgaagacgcttgatccccttgttccttcttcactcgaacttcttcttgggactcacggtgaaatcccgagtcaccagaagatccgggtacgcgcaccattgtggtgtagcgggatcagcaaaatctgcgagattgccaatccaacttcccaactgcgcccgaacaccgacttacggagggggtcccccgatgatccgtgatctgtgtgctgaacttggtcaccttgtgtacccgtcggtagggctggatcttgctcctctggtgtcttccgaagcgtccgagccttgacgagagaacagtctgggcgagacgcggggatgtgggtggagcagcgtggaaatcttcactctgctcgcggtagtattccaaatccagtagtcttgtacttagatctggcggcctggatctggatccggccggattgttgccttttgaggttgttgtcctttacgttgccttcacaggtcttccttggtcgtgtttgccgcctccaatgacggtgtcgttgacagttgagacgagaaggacgcaccggccaaacagataactccggtggatcttggatctgcacttgcaggtagttcactaggaaggtcttggacctggccaatatattactccagtcttacaaccaacactagatctgctatcgctaacctctctacgccatgtaggaccaatgtcgttcccgtttccaggcgagggaggaagcgcttgcgatgtacaaggcaaattctggtctgatttatgcttaagttcattcctatcccaaagtcctattgccatgtggctcctatcatccgatcggttcctaccgactctatggactccctttaccttcattgcgtgtcagctgcttgcccgtagggtcgtgtccacagcctcttgattacgcctggatcttggatcttggatctctgtcgacgtagatcccgatccatctgagtccggatccagctccatctgattcatggatcttggatcttggatctccgtgggcgtagatccagattcatctggatccatctgggcctgtcactattccgcatctgtggcgaggtccagatccatcaatcgtccaattacttgccagtacggcaaggtcgaagattagatctacatggtactgcctgaaggacttcgagaactcctggatgtggccgaagctcaaggtgaagatgacgtcgtctgtctgttgctgcagagcctgtatggacgcaagcaagcgtctcgcgtatggaacgggacgatcgacgcgcatctcaagagcatggcatttcgtgctgccgacgccgatccgtgtgtctacacgagaggtgaaggtgacgacgagtgtattgtgtgtctctacgtggatgacatgctgattgcacctcgccagcggaccgtcattgattcggtgaagacaggcatcgcggccaagtttcgcatcaaagacctcggacgcgctcggtttatcctggacatttgaaatcgactacgacatggagcgcaagaccctgggcatctgccaacgaacgtataccacgtcgattatcaagaagttcggtcaagaaaatgcgaagccgtgcctcaccccgctcgacccaagtattcagttgactaagacggaccccagaccgaggcggacaaggccacgatgaaatcgaagccatatcgctctctcgtgggaagtctgatgtacctggcgtgtggaactcgacccgacattttgacagcggtggctaaactgagccgctttctggagaaccccggtgagaagcactgggatgctggtatccgtgtggtacggtacctgtcgaaaaccaagaacctcggaatcgtctatgatggcttgcttggcacggagctcctcgtgtattcggacgccgactgggctggcaaccacgacgacagacgctctgtaagcgagatgatgctgatgatgtgtggtgctcccgtggtttggcgctcgacttttcagaagacggttgcgctaagttcgactgaggcggagtacatggcgctcagcgaatgtgtgaaggaggtggtgtggatgcgactactactcaaggatttgggtgcggagcaggatggacctacggtgatctacgaggacaaccaaggtgccatggcgttggcgaagaatgtcggctaccaggctcgcaccatgcacatcgacatcatgtaccacttcatccgcgagaaggtcacgagtagtgtcgtggagctcggctacattgagtccaagaaccagctcgctgatttcctgacgattggggagactcttcgctacctgctcgagcgcagtaacgccacggacacgctcgagtagactgcgaattgagtggggtgttacgattggacacttcgcagtctagttgtgtgactccgcatcgaggcacgtgcggctgtggagttgtttgcatgggtgtacaattgcagcggagtgctgcaatgtgattggtcggtttgccggatttggcgattctgattggccgagaggaggtcaagttgaagttgccgttttcataatatctgcaacaaccgacattttccctgtgcaccccttaatgaacatggttgagttagaagctgggatttcgtgtactcgttggtaagacatgataggacagactctataaggtagttttgataaactcaatataattcagtttcggatatcctttctaaccaacacgcgactaccaagcctcgcccgcataatctcaattgtcaattatgccagtagcaaaaggcaataagaaagtaggatgcgcccgagaagttcaaaatatgacgctgaatgccgtagatgcagtgctcactccgagtgtgactggcgttaaggatgtttttaacgttattgaatacgctcagtctacgttgcgacaggcaaggtaatcgcacggtaacttggtaagacgtctttcattagtatttacagcaactatcatactgggaacccccgaagaatgagggggtgctcccaacggattaatactgggaacacccgaagaatgagggggtggacagctcccaacggattaattggacgcgtaagcgtaacctggcgcaaccttcgtgctacaccatccagaaggatgttgaccgaacaggttcaacggcaactacagactgaggcaggaaatgcacgtcaacagtagcacgcttcgcgcgcgaggtctctcagcactgatcaatgttcagtagcacgcttcgcgcgcgaggtcttagatgtactacgcgagcagtacgatctcgtcactaatatggaatttcttcttagtgaaagagcgtctcgctcataattaacatactcgccctaataaagtccggactttattttatagtacaggcctaaaaagcttgattatcagatattatatcagctctaaaaaatatatcttggattttgtatgtatatgtacaaaccgttaactaccggtatttgttgcgatagacttatattcgggagggggcttatattcgggcgagtacgttaggagtcggcgaatcgaacgttaggtagctcacaaatggtaatgttgctatcgctgtataatatagctatatatttattatattgttaaaattaaagcgttaacttttgcttgcccttccattgctcaaacgctgatgtttctccatcgagtgcgtagggcggtagctcgataaacccaataagccgctgcatctggtgcctacacaaagttacgtcagtgtgtatactttgtatgtgtatactttgtatcgtaaagaagcacaacgtagagaagtgagctcccgaggacatgcgagatttctttcatctgcttcttagtatgtacagttcaactccgtacacatgtataaccaatttgtcgactgctgccaatatcatagcagagccccacgaaacatgccaatacgacgattactagcttcatatccgaggcttactactgcaactgaaagaattggaatcaggttatacttgctctgatcgtgcacgtggtctaccttcttgaacgacagcttccgcgtctttgagacgaaagcccgccctcacggtcgaactcctgaaaacgccgcccgtacatgtgccaaagtttgtctgctccgggttggacacctcttggcgcacgtacagccccgcgtagcacgcgtcagccgccagcgtaggcttgatgaggcgcacgcgaaatcctgctgcaggttatgactgtggttggctgcgtgcttcaggcggagctggtaccgccacacgccgagcgacgctgctgctacatagcgtgatagggtcatgagggcagcgtggagcttggagcaatggccacgcaccattcgacgctgggtagacctaggctagctcactggcattagtatagagtttgatcgtggccggccgtgaaaactgcacagaccgctctgcacaacaacaacagcaacaacaacggcacaatgcgcaacacgtcagtacagtcggtgtatatcgggtccacagtggctgcgaatgagctgctactgaaccggcagtgatattccgtacgaatactacgcacctcaaaggccgatggcagtgactgcgggtgcagacgggcgtctgggggtacgagaggttgctgacacgtcgataagcaccaagcgaccccatccgcgacagtcgaagcgctcttgcagctcggttggaggcagacttggctacgactcgcagctgggtcgacgtgtagccgcccgatacatgatctcaattgcagcacttcctggacgccatcacgcaagccacgtgcgaccctgctgacgatgagttaataccgatatatcttatgaaagtatacaatatgcgttaactatccatcatttctgttctatttctatcgtttctaattggatagtaaaacgaagtcgggtgccggcacctcatgccccatattttgtgattgactctcattggtgtaaaagcaagcaccttatcagcataaatagctctgcgactagtcgttggtatacaaatcgacacttaatcgcacgtaataacgtaccgttgagctgcgatcaagttttgggttagcaccggtttacaccggtttagactgttgcctagcatttcttttcttagccattaacttaagccgggcaattaccgtgacttttcaccaaggtacacgaagtaaatggcttcatttgtatactaagttgggacctacgtttgagcttttcaaaaaatctaaaagtgtcccatgtgagttcagagcataatgaaacgcagtcaaggcccctgcaccggctgcgccacacctctctgcttccccgtttttcagaaataccgagcggtaatcgtttctaagttcggtacttcaacgtcagaccccagcagctctcagctatgctgagagaacagacccatgcaccagcttcagaaagtgaactgcggcacgcgcgatattcatgggtgtggccggccccgcaggggccacgcccttgaatcacgcgggccacagttctcccttatcatggcaattagcaccggtaccatcaccagcgtttataccactggtgttcccagccaagtcgaagacgacctagttagggcaatggcatcggttgccctctatgtctaaccggggtacccgtaagtgttgggatgagatagcaactttactggtatcggggctctctatctccacagtaattgtacgaaaatggttatgcatctgcaatcaagaccatggaagcttactcaaaggcaccgacaataggacgacccccttatctaaaaactatttagatgagccaaccacaacgcgtgattttttagatataggggcaaccgctatcattgcccttacaggtttgaatgctgaaaaatatcgccctcctgaaaacatttaccccagggccagccaaagctcggctgccacatacatgcggctttgttgtacagttgagtaactttgcatcggtcgttcagtttggcacttacgagtactggtacccgggaacgcacgaaaataaccacgcgagcaatcttggccggtaagagcaccattttaagcgaatcctgtacaatttccgctttgtccacagttacaaaacgatcatgattcatacttctaccttcaggggggttaagcggtcgctctatttacgtttaacgagaaactataagagttctagaatcgctgtagggtgttccgaatcgaataatgatcctacaacccctctttgctactactggtcttcatttcgttcttcaacctggcggtaaagtgttgcgggatatctgctctctggggcactgcgttcgagtgttttgccaattggcatgattttaccaaagcttttacggcttttcgtagtcctttcgtaagcggttttcttaccagcatcacaacacccgaaaccggtggtgctgtactgccgcgagtactcggaaaggcgccttggagtgtaagtcgaactgtcgatagtactgcacgttgtgccaactggttcatcgcccgctctagagatttagtgatgctgtctgctccatcttgtgcttcatttacttgtataaagccaactgaatggatttctggtggactactgcccatcagaacccacccaccctctcctacactggccatgctgaagcaccctagcgcagcggtccagactctccattgcagacaagcggcaccgaaaatggtatgaatgtccgaggtgcagttcgtcgatgccattcctaagatggagtctggcaatatgcctcggtgctagctccaggagctggagaagtcgctgcatactggcattcttcgaacatgttgcttgctactatgtgtttctataacgagtgatagagattgctgtgcgcaatgtgtcgttaattaaaagatagtcaatgacgctgttcgaactgagaggtaacgcaacaacgagtctgagagaacctgtggcagtgattcggttctatttaacaacataacttcttgcaaatctttcgctaaaaagacgacactcctccgtgctgttaagttgacgatctggttttagtgggcagcggggcttggagtcgggaacctggtgtagtagagcttgcgggtatgaacggtagggctcggagtggggaacctggtgtagtagagtttgcggacgttgggcgtgttctcctgggcctcgacgtcagccgaggcactggccggagcaaaacacagcgtggtggcgatggcagcgaaggcgaggatcttgacgaactgcatggctgtaggagacttcgctggtgagacttgatggacacgaggcgaaatgggaaatgacagaggggaaacaccatgagccggcgcagccggttgccccaggtacggttggccacacacgacaacataagtttatcccattagatcaggtacaaatgtaagtgttttacactgcagagcactgtattattagaggctacagcaatgcattgtagaaacagcaatatgcactgtactgtacatagaacaagattgttgaaggcacgtgtatgccttcaactatctttgagaactatctttgagatggtatcgtgatgtcgtggtttccaatccttcttatgctcttgtcgtccagttcgcacatacggtacatgtacttgtacaggaatactgtatgacatgacgtcgttatgcacacgtttcgttctagctgtgctggcttgcaacctgctcgtattgctgtattgcgataaactacgcgcatcactggcaaagggggtgctggcgccaacaatttttttctaataataaagaaaactacaccctgcatcgatcccgggtcacggactggatactgtaatgccggccacttacgctgacgagttgatcacggctccgcatctcaccgcccatgctttgaaccagcacatgcctgaaggcatgtgttgtgctgatccagcagtgctatcgccttccacgtctagctgccgcctcgctgccgtctagctggttactgctgtgttgcgcaggtgtagtgtctttgtagcctagtcacgtcatgacagtgttctaatgctttttacatctctcttgttctggatgtgtcttagcaatgcgctgccatgaagcgttttgggctattgtggctgtacacgggtcgccacacgcgaaggaactcgtgaatacacgccatgatgacttgaagaagacgaacctgtggctaatacaggcgctagcactacatggtaggcagctctatcacaacatggtaggcagttctatgggcggctctagcataatatggtaagccgccaaggcacatcatggtaggccgccgaggtacaacatggtaggccgccgaggcacaatatggtaggcggcgaggtacaacatggtaggcagcgccagcacaacatggtaggcagtcctataggcggctctagcgtgacatggtagtccgcccaacgtttaacatggcaggcatcatttggaataaacgaatttgtacagggcttaagttgtttttttctcttatttttttatacgcttcttgtgtaaacttggcttcacattttggtagaagtacaatttagtagagcacgttttgacaatttatgattacataatcgttacctgaagattatcgcacgcacctctctctcattggccgaaattcgaaatcaaggtcactactgataaagtacgacgaaatcaaggtcagtagtgataaatatccccgtgctggaccagcacagccacgaacagactgcccgagaagtatcgccacatacagatgataccaacggcatgctacggctgttttactgtaaaaaccgaagatcaaaaaggcgactccacagtggagtcgagtctgggtgacagtggagagtctccactgtcacccagtcttctcgtttgcattgataaggaccttgttttcacagtcgatcctaggtggggtggacataatattaataaatgctacatgtattaaaaagctgtggagtaaaaacacacttgcgttttgcaaaccgtccgttggtgcgttgtgactctggcaaacatttagagggggttattcactctgaagttcactgacagcataaacttttagtttcttcgtgtaacttactaagtaagtggaattcacaagttgtgaagcacagccgcgaagcacatcaatcccagatgcaaaccctgcccaccttttggcgcgaggataccgaaagacgatttcgacttcgttcgtccacgactgcagccggagtatatagcaccctctcggagggtgcatacattgtagcttacggctaaagcctcgctcgtaccactcctcatctgcaggtggtcgttcattgcaagttccccatcctacttcctatgccagcaaacttacccataaaaataaatccccacccccattttaacccgcactacctaaaattaagggtgtccccaaaaaaatgtactgtacgtctaaaacaaaccgtccgaggtttctgtatgtcgtctcactacacttgaaatttgtatgccccgtgcaattacatgtgatgcgcccccgagatatcgctcacgcgatttttgtgtgagcgatcggggtttttcacaatacgatcgaggtttttcacaataggtgatttcacaaattttgtgagaacaggaaaaaaactcaataaaaagccacggagtgtggccaccaacttgtcacggccatggcgtctccactcccgtcgagcgcgtccagctccgtcccgacgtcgtccacctccgctccagcggccaccacagctttgtcttcatcccccgcatccaacgcaactctccccacttccagcaaccccgtacaagcgccacaatccgcgtccaacgtcgacaccgacccggccacggaccatgacgacgccgacgccgtcgccgtgccgcgctgcagcacgtggttcgccatggacaagatcaaccccatcgagaagcgcatgctgcccgagtttttcgcggagggcgcgtccaagacagctgagctgtacctgaaataccgcaactacatggtgcacgcctaccgccagcagccgggcgtgtacttgacggccacggcctgccgccgcaacctggcgggggacgcgtgcgccattctgagggtgcacgagttcctcacgcactgggggctcatcaacttccacgtgccgccccactcgatgcccccggccgtgcactccaactacttcctcaaggcagcggacagcgcctcaaacagtgccgagcaggggccggtggccatgctcgtggccgccaagaaggagaacgcaaggcgcgcggacgtcccgctggcctgtgaggcctgtggggcggccagaggcccggaggattccttcttcgagctcaatgctgaggccaagaagaagttcacgagcaatggcgcagcggccgggaacgctaatgcgcccatggcaactggagcaaatgggaaggcggcgggggtgagtgagggcaaggagatgacggtggggggctttgcgttgagaccgggcagcggcatttgcgaggagtgctacatccgaggagcctttcctgaggggtacgatgctacggactttgtgctgatgccgacggtggcgaagaatctggcagcagcaagtaagtggacgcaggaggagaccaatctgctgctgaacgccgtgagcagcacaaggagcaatggagccaagggccccgagaacgacgaggacgacggctgctgcgactggaacttggtcgcctccaaggtcggcaccaagacggcggacgagtgtctgctgcacttcttggagctgccgctgatgaaccagacggcgccgagtggcctgcgagactcggttcgggtgctgcgaccatttactgctggagaagcgctgaacgcccccgtgctggacttggcgtcgctggtggagcaggtggacccgctggtggcgaaggctgcggcccacgcagcgattggtgcgatcaagcgcttgcacacgatgccagcggctgcgaagacgtcggagaagggtgcgacctcagaggcggatggagctgcagttaaggtggagaatgccgctactccttcgaagactggcgatgctcctgccacgtcgcttgaagatgcggcggcagcggttgcaagtagcgcagaagcggcgggaactgcgtccgccgtcaagatggtggacgtatccgcggatggtgacgttacaatggaggacgtgtcgtcttcaaccacgacaacggaatctgcccccaaggcagaagacggcaagaaggaggacactcccccacctgtcgcgaaggagatgattgctgtcacagaagaagccgccaacgccaccaccgtcgcgttgctggcaaccagggcacagaagatcgcagacgacacggccactggccccgtgcgagatctggtcaatcaactgctggagaaccagttgcggcaaatggagctcaagatgcagcagctcaacgtgctagagcaggcgatcgtcgcggagaaggagcagcttgccaaggagaagtaccagctctacgtggatcggctagcgttctcccaggagaagctcaacggtcgatccggaccctagatccccctacatttcatgttgagtggccggcaggaatcacccggcgttcctgtggagagcagattccaataaaacggtgaactcgttccccacttattcacagtttcgatgggctgaggtgtcggttagatggtacgttttgctccaaaataatagagccgcggcgtctcggtggtattgtgtgcaggcaacgatggaggtcgcctacgctggagcgacttcgcttggagcccaaggagaagcagccgcaacggtgacagtaacggtggaccctccgacctgcgtcgtgcgaacaaaggtacactaacagtttgacgagtttattcgatctaaggcaattgcagggcacgcgacttactctctcggttgcattgaactactgtttagagcggccaaattgtgctcgatgctctgacaagtccagtctcgaacatcaagagcgtggagctgcgcaacttcaatctggaccaactgagtgtgcagcagctggacttgctctttggtggatgcagtcacgagtgccagagcttgtcgttcgagaagtgcacgctctccggggaccgcttcttcgccatgatgacggaccggttgacgagaaaccgagtcaaactggcgcacttccgagtgagaaggtgagtgaacgcgctatctctgaaggtttgggtgaggaactcacgcatggttgtcattctgacgcgattatagctgccagcaagtgagcatgacgtctcttatcgccatctcggcgctgttcacgtcgtcccttgtgactctggagctgtcgtcatgcaagctgccgcgacaggctggaatcattttgagtcagtcgcttcaagcctgtacgtcgcttcgccacctgctcttagccgacaacaacattcgggacggtgggttacgcgccatcgcggatgcgctaattctgctgaatgcatcaagcggcagtgctgtgtccgtagcgcttggtcaggaacatgactcggtaccatcaatgctggagcagcttgatatttctcggaatggaatcacatcagcgggttttgcctccctaacgcaacttccattacgtcgcctgagtgcagctggggacgctattgagagtggcgtgggggctctgctgctgagcaatacctcgatgttggagacgctgtgtttgctggggaacccgctctcggaggacggcaagctggagctggtgcgctcactctttcggcggcgagacaagactggcaagagtgccttacgtgagctcgatttgcgagggtgtggattcaattctgtggatggtctggatttactacagcgcagtttcctgcaagcagcaaccgccggccagcagtgctctcttcagacactctacctagacaagactgcagcccctgcggaagaagactgtgacaacaagccgttcaaggaaggctgcgagagtctgaaggatgtggcgaagacaaactttccaggtctgcgtcttcaatttcagtcaggttcacacgtggaagatctgccagatcctgcgcaaacggcagctccatctcgaagtgcaaactccgtccaaaaccctggcgagccaccacagaagcccagagcagtcgatgctgcgagcaaattaggtctcaccagtgagcttgaagccgtggcgatggcgaccaaaacgagcgtgaacgctactttggcttccgttgctgggctcacctccccattaccaagacaacaagtcctgagtgcagaatactctcgcccggataactccgtcatgcttcacgcgctcgcatctgatccactacgaacaccaactgcgataatccaagcgcacccactgcaacaatccagtatcacaaacacagcgacaatgcgagttgagcctgtagctcccttgccaatgcagcacattgacgtcgagtacatcgtgagtaagacaatcgagtgcatgagccacaacttcgaacaacggcttggtcaatttctatcccgaatggagacgcagcagcaagagcgggtgcgtagcttgctgagttcgaaaaggggtgagtaaagctaacaatgcgtgtatttatttgaaacagaattcctcgcaggtgcagttcttggcagccaaagtggaagcgtgcgagcgtgcactgccacgactggaggcgcggctggatatgctgacagatcgcgtcgcggctggaagtgctcagctggccaaattgcagacggatgttgccctccagatccagcaacttcggcaggaagcgctcacacagcagatgtccaacccgtacaactccggagccttcaactccaggcaactatcgcccacgatgcctctctcctcgcggatgcaatcgcaagtggaagaaatggtgtccagtaaactccaagccagcgagcaacgagtgtactctgaagtggaccggatccgtgctgctcaagccaatgcggcaccgacagacccacatgctgtggtgaatgcagtttcggtccacttgacgcagttcaagcgcgagtttgatgccaaccaagcgggcgttctgagccaattcaccgaaagtgtgagctcggatggtcgtcgactggaagagcggatcgctcaggtagaagctcagattggcagcctcgaatccgttattcaatcggagcagcaagcctcactgttggctttggaggcgatctccgatgccttcaacgatccggctgccccagtctccacgcggaagatgtagcgctacatgtatacatgtacctgtacctgtttagtgtacagtacaagcaaagcaattgagacaggcacgtggcgatggtgacatggtgcgaggaaagcaatacagatttcaaaactcgtcaccacgaccaaaatgccctagttccgctccaaagacaacctactaagatattaatatctccgtagcgatgacaagatcaaccatagcgtcattttgataactctgggttgtcagacaaacttgagtgatatttcccatttaatatcctcatcatgtgaagcatgacacctgcatgtacggaccgctcaactccttctgaagcctatgcccagacaatcggacataggattgcggtgagtctgcaacgagtcgcgtggccatacggaggagctgagaacagatccatccatactaacgatctacagcatacgtgtaagctgcgattgaaatggaggcaacggctgatctaccgatacatgtgtacctgtaacgaattttcctgtgagagctgtatctggtcaaatacactccacgacaaaaagatatggacaccaccaaaagtggctgtaacttcgtcattttttatcgttttaaggtgcggtttggactagagttgcagaacacgctgataaagatctgcacgcgcgcgcttttgcgcttcttcaggtagctcacatacaaatcactggttctgcccaggtgacaaaacttatggacagctaatccccatgcaaaatcctatattaaccaaaaccccttacaaatgatacaacttggactttgtatggggcgacaaaggaacccatgatttctccactctaccttagtactgagccatatatcatcgaccaacagtttagaatggagaagacaatcgtatatccaaaagatagcagcatacagagctacaaattggcactaactaggatgcaactgaaggtgtctcgcaagtcatcagataatacatggtagccaccactcgaaatttcagtcgcttactacttgctcagttctgtgcgatggtcgatgtgtttattacagatcactaaacacaccttctaatagacaataatgccatcagatatttgtctaacgtcgcgagtatcgccgtgaggctggttcctttgtcgccccatacaaagtccaagttgtatcatttgtaaggggttttggttaatataggattttgcatggggattagctgtccataagttttgtcacctgggcagaaccagtgatttgtatgtgagctacctgaagaagcgcaaaagcgcgcgtgttagcagcgtgcagatctttatcagcgtgttctgcaactctagtccaaaccgcaccttaaaacgataaaaaatgacgaagttacagccacttttggtggtgtccatatctttttgtcgtggagtgtactcgtgcttttactgcagggcatggattcgagttttgctattcgtgcactccaagaccagccggtctccggaagttatccgataacggcattttcccttaacaatcctgatgttatcttctgatgtgtttcgatacgcgtagagactcacttctcggccccacggagctttcaggctcgactgatgcagcatgcgctgggagtgaaagccgagagggtcccgtcgactgcccctatcaagctcacttcgctatttgcactccaccaacaagctccaagacacccctacccacttcatctccagccaagcgtctccacctcgtcgtgctgctggtcattgcggctgtcctgacaagcattaacgctgccccgacgtctgctggcgcgaacgtgattgcaaccagcttccacacggatgtccgctcggtttttgtcgaaggaaacgctaccccagctaagagattgctcaggactgttgaagatgaggacagcgaagaagaatccgacgaggagagggggtcatcccgtcgtcgatcagcacgaagtggacgaactttaagctcaggaggtggctgaagaagggaacgtccgccgacgacgtcttccagaagctgaaactgaaccgtggggtggagtcgatcgttggcagcccgaagctggagacgatggccacgtacgtgcgggtcttcaacaagaagaaccccggacaggaaacgactttgatgaagacgatcacgaacgcctacggcgaggctgcagtggccaaggggcttgaagcggcggcgaacgtacacaagaccaagagtaacgcgctggagctgcagggtgcgcagttcaaccaatggatcgcgaaggacattaaagtggacgacgttttgccaaaggtgtttcaagtcgagtccaacagtgcaagcgcgctggaaaaactgatcgcaggcaactacgcaacgtacctgaagactcgcaggcaactacgcaacgtacctgaagactatgcccaagtaaaaatcctttctagtgctttggaagtagatcagtcgcgccgccggttgtgccgcgaggttgactagaccggtaccgtgccggtctagtcaacctgcatgtagcttccgcatcgatcgatacaaacattaactactctacagtgtagcgtgtagcgtgaatgaaaaaaaaatgtgcatgaattagtggtggcgattccgaattaatgtttgggtgacaggcaagtcgtgaagcgttagtgtttagggccgtcaattgcctttaaaagcaagcttagagcgcaataaccggcctatcaatcagatctatgtaaaaaatcctttctagaggttaacatctctggtgtgacggcaggcgagccggaaaaaatataatctttcaccctaagagcgtcgaggttgcgcgtcagtgtgcacgccatgcgttctgtcgtagacagccttgaactgctttgccactgttttctccgtcacgtccgcagctttcacgttcgacgcgtcgaccttgtaaaacttggtaaggaccctaatcgggtcgtatccttcgtccacccagtgaacaaattgcgcagtctggagctcttgcgcttttgcttgtccacgcacgcttgggagcgcctttgccatcattaacttcaacgccagttcgccctctccatagcctttcgtcaaaacttggagtagcgtcgtcgtttccgatttttttccattgacgagcttgatatactcttccagcgcctccaacttcgggctggcaatggctacaaagttatccaccggaaacttcagcaacgtgaaagcgtcgtcggctgatttcccgcttttcaaccaaatcgcgaactgttccttctgcaaattactcgccatcgtttccacgatcggatctctcgatgcaggtgcagtaaccagcccgctcgccacggcttcgtctccgtagtgcgccgtcaacgccccaatcatcgaaacttcactgctcggattatctctgtttaaggctgcaaaataccttctgagcgtcctcaagtttgagcttttcagagcattcgtcgcgtcatcatccagatttaacagtttcaagatgcaatttctcgtacacccactgcttgatcagggaattctccaaccgcacggccttcatctccatggggtcaaactttgcagcattgagcatcgacgctaagttggcctctccaccgaagcccctcgctaatgcattgagcagcgtatcttgaccatcgtttctactgttgaagaccctgatgtagttttcaagtacccccaactttcggctgataagagcttcgtatctgttgtctcgaagcctgagtagcttgaagacatcgtccacagacttctggctgctcaaccaagcctcgatctggtcagtgcgcaatcgagtcgcgcggtccttcgtctgcgggttgtccattgcagacacgagtgccccggccacggtagcgtctccgtagcgagtcgtgagagttccaatgacagagatcttgtcgtttgggtgcttcttgttgaacatgttgacgtaagtggacaaagcgtccatcttcgagcttttcagagcggccatgattccactgtcgagcttcaatttggtcaggacttggactccgtccttgttcctgagcaaataggatttcaactttgcagtctcaacgcctgactttatcagcctcgtgaccttttcaagaggagctctctcttcgtagtcttcgtccgatgttgcatggtggtctctcacctctgttcgcggtcgagtggatagcagtcgaaatgttgggcgtgatcgtcttgaagtcggtactggccgtaacacagtcgacgcatgccacgatagctactgctaacaccacgatgcagttgagacgcatcgtaggacagacttgacagtcgctcttagggcctgggcgctggggtgagtgggcaaattgcgaagtgttcggaatgagagttcgtccaggcgtacggtttacggatgatagattactgtagaacctcgtccatgcctccaatcgttgcaccgtacacgtgtacgtgcacgctgcatcccaagattaaactactgtacaaagatgacgattaccgccgagggaatggtggatacatctcaagttctcctgtatggagactttcatcgacttggcttttgagagaagcttggaatgcaagcctattcttcacaagtcagccgactagcactgcacctcgcgtgttattctctagaagatactgctgccccggtagcagctactggttgccaacgagccaaccgttggattccaacctaacaagctacacatatactacatgtataacatgcgtggtttacggttgctcacaatatactaatccccggtgggacatgcacagcaccgggtcccgaggtcaaactccaatctgactattcattccattcattcatactggtacacaccgacaactccacttttaaccatccgatccacggaatggtttcaagagctagagaaggatcgtgaaagaaacagcttgaatcgctccctgaacatgatcatactcgtgaggtcgtcgtttcagcttctcacctcaagtagcgactatcgcgtttctgcgatttcatcataaatttcttgtcaacaccacctccaaatgctcgtcagcgcgctgtgctgccaacaggtttgcaggtagcagtatgcaacgagttaaatcgaggcaaacacgcacgtgccgtgtgcgatgcgctataaattactgttaagctgaccagcgggcttgaatctcttgccatagtgcagtagcccagcaggatgtaggcggggtgtcttctgaccagctcccacgtggcgtgcaattacctataaactcgggaaaagagaagcaggccaaagcaaatgtgtcgccgtgtgattggaaatgtgcgtcattcaacagcaaagacacctatgccattggaggtcctacaaccacatattgaatccacaatagttatcgccgcgaagaccctccacaagtctccaaaattatgtctccacaaagtcatccagctccacacacattgccgccttcccttccattttctcggatatcagctcctctggtttcgaagcttgggtcaacgtaagtgtagggccgacgttaatattctcccagcgtagcagccccatgacagtctccaatacatttgcacgaacgcttctcgggtccccgacagccgaacaccccgtcaagtgaatttcgcaatgctcctctccactttcatcgaccaccggcacgaaatggttccacatacacgcatcattcgcccagatattctccagtgcccctccacaaacgacaggatcttgcgggacgctctgggtcacgatcgcgtagctgccattcgcctcaaatagtcgaaagcgcaggtacagcagacgcacaaccttgccttcgcgatccgggtccaccttctcgcgcgcaattaaataagtatcatcattaaacttcttgaccacctgcataaaattaaaacaacatacttgtcagtaactagacccacataattatttttttccttgtctcttacgtggaactgctgcgtcgctgcctcggatgcgcttcggtaagtcacaaacttgatctcgttcgcccagttgcgatctgccaggtgcctggccgaccgattccggaaaagtttcttgaacgagaagtacagcttgttgtccttgaaccggtgcagcgtcgtccacccgaagaggtaaactcgttgggtgtccgcaaagcccactctgtccacctgcgtcctctcgcgtcgcgaggtcaaaatgatttcagttgcgtgatccgcactgaacccattctggactcttaggtccccggggccctcccgacgcaactgcctgtacactcgctcctgggcctgttgctctcgagccatttccttcagtaacccctccatcctgtcctcgcccttgactctctctcccagttcttcctggaacttgaggttctgtcgcatgagctggttcgcctgctcacgggcgtcctccaggcgtcgctgcaggtccgcaatgcggtccgtcccagcctccgacgcgtggatttgggacagcgattgttccacgcgagacagcaactggcggtgcgtttcctcgagactccgcgcatcctgccgcagcgcctccatgtggtctctgtcccgctgccgcgcacgctgcatggcctcccggttgcggcggcggcgcttgtccagcgacgcctgccgcttgagctccgtcgtcgactgctgctgcattacaatcccgttggcaattcgactgactacaggcgtccccgggctagtcccggctgtatattttaatgtacctcgcataggaagtacaacaagctctcaagatttgcgcgctacttctacaaacatattgatttagatgagtgtacagcgatacctactgcgacaagtggcacgttgcggaaatacctccaccgtattcttgagctaagcttgtagtaagtcagtacatactcatttatgttcagaccgcgtgaatcttgttgattcgcaaacatcataagtaccactgtggcgaataggccggggacgcctgtacaccgcaattcgaattgattacgggaagtattatggcggaagagtaatcaatcttttgtgtaagttcacctgtgtttgacggcaaaatacaaatgattagtttattataaaggcacttgttgctgcacccatccaccatatggaaaactaggctgtgacgagactattgtacccgtttgcgcccgaccacgaccgtcaagaaccgaccaaaactgaagcaagctgtatactccatgtatagaccggttagatgaagaatgttcgagaaggcccaatgccgaccaccaaagcgactaagcacttgttacttgatgttaaagagggtaggacactctcacgttggctctcgcctgtagacttagcaacggcacttcgaggggcgccgctgcgcgacctgccccacccccctcgagccttacgctaagtcctcggctcggccaggcgaggtatctggattagatagaaactcctacttaggcataccttccggcccacgcgccgaacattgcagacctatgctttgcttcggttgcaaatggtctctctgaggcctctacgtgaaatgactaagtgcatagcttacggggagcgaattttcgaacagtacaggacactacacatctcggacagtccattacattgttttttccatcgttctcttacgttaactcctaccaacagctcgcaagattcttgtggccacgccacgagctgtagtcttgaacaggtaaacaacttgagcgcatgcgttgacctagccaagcaaacaacaaacatcaccaccggtacccgactgagaacaccgtcacccgtcaccgtacccgactggaagcttattttccccgactgatacggctgtacccgactgacgatagccccgccctcgaactgatcccaaacgctgaagtctcacgcattctgcttgcgctctttcgcttgttctcctggtaaagctgtttgaaagcggagcaggaagtgccttctgtctccgccggttaaagctggccgctgcgcgtacagacacgagtatgaatacaccaagtgatgcttagatctcccccgaacagttacttgcctgacaggactgagaggtggcctgatgctcgtgcatctcttcaaacgcgcgcagggaggaaggggggggggctctgacgccttttgtgttgcgtcgaccgcagtcttgcagccagccagggagcgctccacgtcatcgtcgccacgaggtgtcgctgcagcaccactaggcgctaccggtagtcgtcgacatcatgcgcatgcttgtacggccaacagggcgaccgcgcggcgggggggggttcatgcgtgtggcggctcgccgcagttttaggaatgaatggttgaaagtcgaaagtacagacaacgacggataaatccggcaccactgaatggcatcctccatagtaaatgtgccagaattctctatcaggaacgatagagattgtacaaggcaatgacataaaatacacgtaacggagcataaagtacacacaaatttatagaaagtacttaaaccatatggaatacaaatgtcaagtgtacatctcgaagttgtaaaaagtacaacatatgtgtttgcgttgccgtatttatccgtcgttgtctgtataccgcgtatacgaagttcggatggaggtcagaagcgtggttaggttattagtgggtgcagcaaccactctctattttaaaaggtgtgtatacaagtgcactccagcacacaaagcaaatgcacaaagtgcaagcttgaagtagtgcatgtagtgaattgtgcagtgtacgcgtagactgtggctgttgttcttagtatcatacaggtacaatgttgcccggcacatcttgtttttgctataagtttttactccgcttttaccgtttccatttcaagtaagaactcgctgccgattagcgttgtgcgactcgacgctgagatgtggttcgtggtatatatcggatcgttgctcattgtcagtacccttactcgtgcacgagtctttcgatatcaactcgctggcctgtatatttgccgacccacactttctccgtcgacaattgtaccttgagatagctcgattggagcggatagtcttaactggaatgaacagctcaatcactaggggtgatcgcgatccctttgataaggagtttggtaatattctcggaaaggataaatctacacctaccaaatgaatgctgtttgataagcgcttaaaagtattaaatgggtcggaaattggccatcaagaagcatttcgccaaactgcttattcgatcggattcactatcaatgggccgcgcctgaggggttatttgtacgacacagtaccatgctcgctggttcagagtctgacgagtggctcttcaagagccttcggtcctcagatcccgagaagcgaagattgcgagtcggaaccacaaaccagagcccatacccaatggttatactgaccgataggtcatgctgctaggcagcccaaatcgggttaattcgcgcctcggtaactgaagccagtaaactgaggccggtatcgtggtcctttgtcactggctgtctttctcctggtgacccggtaactggagctggtaactgagtccgatctcgagtcacttgacttcagccattcgcattctaaagcaaccggcacctacgtacgtacctatctccctgcttttcctttatctcgcgaactattgctcagtacagccacaagttccctacactaacatggtcgcacgtttttcgccataattcgccactatcaggttcactacgacgctgaattcgagacgtggtttcggctgactgttgtagttgacgtcgcaggccgtgtctacctcggtctcgctgataggcgccatgggactacagctattgtgcaattttacattctaccactaaaccaagcagccggcctacgtacctagccaccgcactagggccccgcaatggctaggataggggtcttttgaccgtatctgtagttgttttgtttttagtttatagcaggctttttatcaatacccattcgcgtctcctgcgcctgcttcgcagccgcagcatctgcctggtaatgcgatctgaaaagtagatactgtctagtaagtttggagcggtatgaggacaacacgagttttaactacgaagtacaaatgcagtagctacaagaccgaatgtgtgaccgcaggagacacttactctatgtctatagtgtagccctcaattatatcaaactttgacattgagcagactattttttttagaaatccttaaatttcaaagtttacgactacgttaatggccccacgaccgctacgtgcggcgatattgcagctggggggggggggggtatacggcgcgcatcttggcgctagaagtcgtggtctacagataattttcagggtacaaacaatgcaaagaaaacaaaacgcaacgttaactatgatacaagatattcaatgctccaggtttctcataaaggtcgcccatgaagctgatagttcttcctctcacttgctaggcaagagaggcgacgagtagttaagctttgaggttgcgctcgcacgccttgatattcgtcgtaatactactgctgtggtgaaagttctggctgcccccgtaaatttgctatcccagcctatgcgtagccctagtttcaatcctgtccatctgtttggtaaatcacaaatgacgacgaagactaatacctaggagatagcttacgtaatgcgtcatggtacgaagataacacgtctaggtgtaacctttttgccagcgctcaaacttcaccagctaaaagttgtaggaaacgggagctcattgtcaaggaagcgaaggtgaaggttgacttgaacttcgccatcccactgggaggacccaagacaagttcagaacatcatggtctccccgttgtacatcacaatgaagatcatgggatcacacgcgggatcgggtggttataaaacggagctatcatcaccgatggcgtatactagtagagttgggtcaaatcattaccgagttaaccctattgtggtgggtccaccaattaccgttattaccttcctaataacttcctattaacggtattaccttttgtgtaaagttggtgtatcaggactgccttagctaaaaaaacaaggacgggatgaggctagcacctatgggcccatcataccttcctagtggttggaagactctaggtgggaacaagcatgaagtcctagtattgaggacaagcgcattcttgcggactctgaccggagttttagattgcacacaaaaaggcgggaaaatgaccaaagaggtatgaaatccaaacttaaatgccatgtttttttagctaaggcagtcctgatacaccaactttacacaaaagtgtgtaaagtgtgcagcgactaccctagtctccaccgaacgacttaagatgaccgcatacatgtttggtcgataaaacttggcgacacacggagagtcgactcgaggaatgcgcttcgcgcagccatgtcgtggcgctgtggctttagtttccaatcttgcgccccttgcatgtctgccagttgtgaccttgttggtggcttgcactgcaccggtagatactgagtggtccatcccgccgctgctacgaatcctcttggtctggggacgaccacgtctcgctgcgaggaccggaggctacgtcacaccatcaagctcaagctcttcgtccagcggaagatgcacgacctttcccatgaacgcgcgcgagtacgacgacaggttgtacacgtcgtcgaagtactggaagaccgaggcgagctgcttgcggctctggagcacggcaatcatgtgtcagcatggtagtctgtgctggtcgatgaaggcgcatgtgcagtgcctctcctccaggttaactcgatgttggacacgcataacgagcgatccattgtcccggtgcacgtagctgatgtgaggagacgcatgctggacacggcagtgaccaatgtctttgctttgcgggttgtacagcgccatgctttttgggggcttcttgagcgatacaagggaggctgcgtgcatgtgcgccctcgtccgtgaggatgctgtggtgtagtggatggagatatttttgcgcggatacccaagatcaacaagatggccaagatcgacagtgtggactaagatcggcaaagcgtggcgacgcgtagtctggcacgatagtaaccagcaagaaggtcaagggggcaacatcaaggtgaacaacatctctggaggtgcttgagagccaaaccccggcgtaatcgatcaaagtcgacgatatcgatcttggcggtgatgacgcgatcttagagaaagagtaccccatggattacgcggacaccgggcagagagccagcggcaccgccaacgttcaagggagctagagagcacgcgcacagaccgcacgagcgcaggagtgcaggagaacgataggacaagggcttaggacaagctaacattttaaacagagttgtttttatcttctactgatcaagtggtcttcgccttcgcactaccgggcacgggatatactttggcccacccgacgctacgtaagtcgacttataccccaagatcaaggaacctcggatgccaggatagcttggcccagcgtccgtcaaccctcatttcgacccaccgctagaggaagcggcaagcaagggaaggtaaaggaaggtcacacatcaaccacaaggcaacaccaggccaagatcacacctggccggcgagtgtcgatctagccaaccccagatcgaaaccgccacaagtactccggcgcagcgtgaagcatatcctcattgttgccacaagttcccgctgtccgccagacagtccaagactcaaccccaagcgcgtcttctcgagatcacccgaagagcgatccagcccaccgacgggtacacaaggtgaggatcagcaacttcacggaagatcggagtacccccgccgttagtcggcagttcgggcgccgtgtgcaagaggcccccgcgatctgcaaattttgcggagccgcttcgccacaatgctggctgcaccacggtgctctctcaacacctcctcctcaattgcaggcagtcgttcgcgtagctgcgcccggttgtcgttggcgagcatgctgtcaaccggtagccccttcatttcctgccagcacaataccttcctgcaacgcgtacgagcacattttgcgccacttggacccgcccacagccacgccagacgcatcgtgcgtccgcttaatcatcgactcgggggagataggctcgtgcgtggccaccaccacgggaaacttgagcttcgtcaggtccacggacgcgaacgatgttttgctcgctatcagcgaagatagcagcttcgaagcgactgaacatgaaccagcatgcagtacgacacgtctaaagcagtgtaaagcatttttggggcctcacaaggcgggacaggcagagaacacgacgtcaacagatcccaagatggcgtgaccaaagcgcgtgaccaaatcgcttcatgacctgtaatagattgtcccactaccagcgtcgttcggtgtcctcgtgggtcaccacacacgaagccgtacgggcagtactcgatggtgtctccggcatggagttcttcgtagcgcagttggtctgctgagagagcaaccatgacgacgggcagatgaccatggtttggcttcgaacggtcgggtactgaggcagcaagattgagcgtgtttagcagcacaaatacgcactataggcagtcacagtgggatgccgatcacttcggggcggagtttgtggggataagacactaggacgtctagcgtcctcgcgcatacaccttcatacaccttcagtcacttttgtggtcagtctcatacctctacacgtcaattattttaattaaaattaccgcatacacataccatcaacaaatacactcgtttggcatataagttttgttgctttgtagcttgtggttgagggggcaaattccgaagtgagattaaatgttatcgtctctcaaactactctctagtcttcccctcctgttttccttcttgttctccttgtgctcgttggtgcctctcatcagacggattactcccgggttccgcttgacttgatctcataatacatgggtctccctgaccagccattggtccagagaccggctgccgccggctctcccgtcgccgtcggatcctccgagtcatcggcggatgtgtccacacgttctcctcgtccttgtgcatgtattggcggaaggcgcaccgccattatgtgggagcttgccgtccagccctgaagcagcgcgatctgcatggtgaggacaagagcaacagacagagccccgacaagctcgcgaggctgcaccttctgcttgtacatccgcttacattggtagtctaagaagtaggcgtgtgctagttttgttttaggtcttaggtagtcctgtagcgtggtagacaagcacagcaagaagcccagtgcctctttgcattacctctctctgcattacgcgcattctgccgcgagcaacagttccgcgagaatagatactagatggtggtgaactttggcggccttttcgacacccagagcgtttgctcgagtccttttccagcgagtaccggttcttctagcacagctcgtcgccgcggtgagggaagtgaaagctgtcaccagatttggcgttttcactaggattttgtaatgaaggtttaggggaagtggtgttttaaactgctattttggtggtagtggtagtgaaagcgctttcgaaacctctctaatatcgcaaaaattgcagcttttgagacgtgttcgatgatagcgcatgtgttgctagcttagttgcggcttatacgattcatacttcaattgtcacagcatgatattgtcgtcactggtacgaccaatggagaaaatttttgcccaaccgttgatggagcgagcagcgttatgtagcacacaagggttcgcccttttcacacaagccttttatccgcactacgttcagccctagttgttttgcattcttttattcttttttaaaaattcttaccgtgcgtttggcttcacgaacttatttgtgcagaggaaaccatgagagcagattcgaggtaaaccgtcgcgccaaatgttggtttttgaatactatctgaatcgttcatgcacgtctacgtgaaagtaggcaattgcatgatttcatcactaataagttactactgtagtacttggaagatgaaggcatggaagggctcttggtacaggcacttgagatgcttgaggtgtttcggaaagtgaatacatgttggtcgagcgaacagcgctcgccttagcctagctacagaggtgttgatgccacagattatgcgcagaggatacttacggcactagggccatgagcattcgctctggcaactacaaccatcatacctatcaaattgacttgtacctaagctatgtcataatacctgtctcgtgtacaaatgtggtcagtgcagataacttctggcttcagtccagagtctgtcaccgaggcaggctcaacactccccctgaacttgatgggaaggcaaccccgctcgcggcggccaacttcatgaactgtggcgtcggcaacgccttcgtgaggaagtcggcgagttgtcttgaggacgggacgtgctcgatcttgatgtgaccggcgtcaacatggtcacgaacgaagtgcagaagaagatcgatgtgcttggctcgagcggagtaaccgcgattgcaggcaatgctaatcgcagcttggttgtcgacgagaacccggatggttgcatgcactccaacacgcatttcaacgagaagctgacgaagccactgcagctcttgtgtggcgagagcgagggccatgcactcagcttcagcagtggagagcgcgacagcattttggcgcttgctcttgaagatcacaggacatccgtccatcagcaccagcacgcctgaagtcgattggcgtgtagccatgtctccaccccaattagcgtcacagtaggcaccgattgagaggttggatggaaggccacgcttgaacacgagcgacgcacgctgtgtaaccttcagatagcggagcacacggatagcagcatgccagtgcattgcctgagccttgtccaggtactgtgatagcgtgctgatgactacacatatgtccgggcgcgagccattggcgacgtagagcagtgagccgatgagttgtcgatacggcatgttcacagcgagttgcggggctctgtcgatgggacgcagatcttgcccgactactttcgggttgcgcactggcaccgcatcagcttgaccaaaccgatccaccatgcgggcaataaactgcgactgccgcagatgtagctcccgttgcacacgattgtagttgatccaggcaccgctcaatggtgacagcttcttcttcaactgcagagcccaccaacaagtcgtcgacgtagagaaccacgaagataggtccatgtggtccaacacgcacaaacaggcacgtatcactccggcactgggagaagcccatgtccacgaagacagaacgaatggtcttgaaccagaccgctgctgcttgtttcagtccgtaaagactgcggagcagcttgcataccattcctcgttccgcgcgcactcccatggggatggccatgaagacagcctcgtccaggtcaccgttcaggaaggcggtctcgacgtcgaactgcttgatgaagtagcccaggtgattgcaggcagcaaagaagacgcgtagagtaggaagaccagcaacaggggagtaggtttcatgatagtcaattccaaacgtctgcaagaaacccaaagcgacaagccgaggcttgaatcgcacgatctcgcctcgctcattcctcttaagagcgaacacccacttcgagccaataaccttcataccaggagggtggcgaacaatatcccaagtgtggttacggatgtgagaccgcagctccacactgattgcatccttccacatggcggcatccgacgacttcatcgcttctcgatacgaaagagggacatcggctgcagctaaagccgcctcatcatcttcgagccgagggcgtttgggatccggctcaccgtcactggagctgtcactggagaggtcattgtcaccatcggcctgggacggagcagcaagttgtacatcaggttcattggtgtgagatggtggtaaggccagtggttgacggttcggcatctccacactcggaagaaatcgcggcaccatgtcgcgaccaacaactgcacgtcggagcgagccgcgaaataccagttgactctccccttcgtccgagcggccttgcaccatcacgtcgtccctggtaaacgcttccatagcacgagaaggggcgcgcaccaagtcatgtcctgcagcctggtgttggagttgctgctgctggagaacactcccttgagtagtcagcggcgtcgcagcaggcaccaacgcacccgacatatcgtcgccttcgtcaatgtccatcggagtcgatggcaggctagccatcggggctgcagtgtccacatccatgtcgacatcaccatcattggtagagccgtcaggagccgagtggcctggcacattggcgttagcaccaaggtcatcatccaagccaatggccaccggcgggtcatctcgcacaaccagcgtctgttccgtcgatggtgggcgctcatccaggctgatggtacgggctgtagcaacacgagaggcgtcgaagtcccatactcggtaggccttcgagttgtcagcgtagccgagcagcatgcactggtgggccttgctctgccactccgttcgtagtgtcttatccacgaacatgaatccacgggagccaaacacgcgaagatggttcaatgtgggcggcttcttccacatgacttcgaacggggtgacgtcgttacgtgccgtgtttgggatacggttggtgaggtaaacggccgtcatcaccgcttcggcccaccagcacttgtcgagttgctgatattagagcatcgatctggcccgttcgacgatcgtacggttcattcgttcggcgagcccattctgctggggcgtgtagggcgtggttgtttggtgcacgatgccatgtcgcgtatagaacttctcaaagctcttactcacgtactctcctccattgtcggtgtgcagacacttgagggttgcacccgtctgtgtctcggcgagctgacgaaagtcttcaaagcacttcagcacctccgacttggctttcatcatgtagaccgcaacgtgtcgggagtagtcatcaataaacgtgacgacaaagcgagctctgccctttgactttggagtcataggacccatcacatcactgtgtacgagctccagcaaagcatgcgtcttcacttggctactcgagcgatgggagaacagggccgcagccatcttgccgcaagcgcagccctggcaagccccgtccagaacctcctccgacgtcatgtcgggcacatcatcgaccaaccgcgacaccgcgcgcatgcgggggaacgagagatgcccaagacgcgcgtgccgtacagcgagactaacgttggcttccgccgacgccgcaatctcgtccatctgcgctttttggagtacttgaacgtcccagacatacatggcgccggttttgcgcacacgggacaccaacgtgcccttgtactggatagcacatccgtcaccatcgaagagaaccgacatgcccttggcagctagtgcaggaattgagagcagcttcctgtccaggcttgggacatagagtaccttagtcgtcttcaccggggctccgtccccggccgatacgcgcaccgttcccaccccgcgagctgccaagcgatgcctacttgccacacggacatccagtggcccggctagctccgagaactcacagaaatcttcacggtcgttcgtcatgtgcgagctagcaccgctatcgaggatccacgacaaggttacatccatggacactgcgaaggtatattcgccctggtcgtcgtcttcaccagctcgaggtcactgtgctccttacacaaacaacacctcccgttgaaggcgttactaccggcgcgtccaccgcgccattgcgcgccaccacgaccattctggcgaccgcgccaccgttgacggcgaccagaccgtcccgtgcggacaccacgaccttggtgatcgtccgagcggtcaccacgagcatgcacgtctccgacggcacattgaaagcgctctctggtttctcgcgcttctggatcgtctcatactcacgccggagcatctctttcgcttcgagcaacgtcatgttcccgtgggcttcaatgatcttgatcatagcgtcgtattcttgcgggaagctcccgagcaagatgaccaggcgctcttcctcgaccacgatgtcaccaaccgctgatagacgcaaacacagctcatcaaattgcatcagatgctgcataaggtcgaccctagtgctcatctcgaactcgtggagctgcttgcgcagctgcacacggttgtgcagattctgtttgacgaagaacccgcgcagcgtctcccaggcttgaattgccgacagagcctcccgtaccatggactgattcgtcgggcctagcaatttcaccagcactgccaaagccttgaggtccgcggctttccactccgcacttccttgcagagcggcctcttccagcttgagcacgacgtggttgagcaggtccttgcgcgcgagggtcattctggcgttgaattcccacaataagtagttgtcgtcgcgaagaacgtcgttgggaccggcgatgtttgggctcataaccacttggaagatgaaggcatggaagggctcttggtacaggcacttgagatgcttgaggtgtttcggaaagtgaatacatgttggtcgagcgaacagtgctcgccttagcctagcaacagaggtgttgatgccacagattatgcgcagaggatacttacggcactagggccatgagcattcgctctggtaactacaaccatcatacctatcaagttgacttgtaccaaagctatgtcatattacctgtctcgtgtacaaatgtggtcagtgcagataacttctggcttcagtccagagtctgtcaccgaggcaggctcaacagtagtacctagaccccaaaactccttaatgaaagtgtttatctcggcgataccgctggtgattatgaatgacgctcgattacggtggtgagcatgcgtgagctctccactgcatcacaggatcggtttgaatactccgtcgcagttctaaacatgtatgccgacaatgccccaccctgcagtctgcataaccccctcaattaatctaacgtcggtgtgcgtttttattgttcgtaagcggttttgcatcgttaactttgccatagtcacttggtaatttgccaactccctctgcctcctccccacacacacatcccataacagcaagtctatgtgtcccaagtcgactgcactcctacttgcggcaactctcctggcatgtagtgcagctacagccaccaagttgacgtttgttgacctcgcggtaatgctctaatcgttcgccgataatcgaagtaccacgctgttgctcaaggcctccgaagcagtggacaatgacgacgacgagaggggcgtccttgacgcggtcgcgggtctgatcaaggcgggcgcgcccaaggttatcgacaccaccaagttgcacacgtgactgtatcagaatgcaaacggggtccacgtcttaaagaattttgcagctcggtgacgacatctacgcggctctgaagagctcgaagctggatgctatgagcaagtacaccgccatgttcaaccagaaacacccagacaaacagatctctctgatcgcgacactcacggcgcactacggagacgacgctgtggcgaaggcacttgtgactgcgcaggcgaatagaaagactgcggatctggcaacgcaactgcgtagtgattgtggcaaagcggctccgcaaaatttgcagatcgcgggggcctcttgcacacggcgcccgaactgccgactaacggcgggggtactccgatcttccgtgaagttgctgatcctcaccttgtgtacccgtcggtgggctggatcgctcttcgggtgatctcgagaagacgcgcttggggttgagtcttggactgtctggcggacagcgggaacttgtggcaacaatgaggatatgcttcacgctgcgccggagtacttgtggcggtttcgatctggggttggctagatcgacactcgccggccaggtgtgatcttggcctggtgttgccttgtggttgatgtgtgaccttcctttaccttcccttgcttgccgcttcctctagcggtgggtcgaaatgagggttgacggacgctgggccaagctatcctggcatccgaggttccttgatcttggggtataagtcgacttacgtagcgtcgggtgggccaaagtatatcccgtgcccggtagtgcgaaggcgaagaccacttgatcagtagaagataaaaacaactctgtttaaaatgttagcttgtcctaagcccttgtcctatcgttctcctgcactcctgcgctcgtgcggtctgtgcgcgtgctctctagctcccttgaacgttggcggtgccgctggctctctgcccggtgtccgcgtaatccatggggtcgagatcatcactctttctctaagatcgcgtcatcaccgccaagatcgatatcgtcgactttgatcgattacgccggggttcggctctcaagcacctccagagatgttgttcaccttgatgttgcccccttgaccttcttgctggttactatcgtgccagactacgcgtcgccacgctttgccgatcttagtccacactgtcgatcttggccatcttgttgatcttgggtatccgcgcaaaaatatctccatccactacaccacatgatcagctggcggcttggctgaacgacggccaatccgttgtcggtgttttcaagctcttgcacctcagcgacgacgggtacttagcgcttacgagccggaagttggaggtgttggaggactacattgccttgttcaaccgcgagaaatcggctgagaaaacgttgctcgcgacgttaacggcgggtttcagcggagaaaggagattggcggagctgcttgctgtcgcgaaggcgaacggcttcacgaagctgaaggccgaggaattcgagtctgcgctattcaacaagtggctggggcttggtcagaaaccggaaaccatcttgaagaacttgaagctcgataacaacgtgaagggcgctctgagcgacttgaacctgcagaccctggccaactacatttctgtcttcaacaagaaatacccggtcaacgaggcgtctctgctggggacgttcacagcgcactatggcgaagatattgtcgcgaaggggctggtgtctgcgaagaagtatgtggtcacggagagaatttccttcatcattccggtcatggggtcaaagagaacagtccattcacaatgtttagccgaggactcgtagagtcaggtcgaggggcgtaagctagtcgtagcgtcggcccgagagttcaagcgtagaggccagccctgggagtggtgtggcgggttgcgagcgtggtcgcggtggaggattgccaagcggtccgctgaacttgatcgttgtgccgccgaagagcaagtgacctcggaatggctgtccccactatcctgcctagcgttgggaaaacttacccgcccgggaactgcatactacagccccgtgtgttgggtaagaaaccaaggtacctaaatatacaaacataaatgtagccgctcggcgaggacgacgtctgatcccgttgtcgaagttgatcttcacgttctgggatgacctccaatcagcgggaaaatgagtttcccccttcgccttcggcgtccttggaaaatctccattgcgacgcagctgcagactcagcaactagaggggtggctgcgagtgggaagtccgtggacgatgtggacgctttgctgaagatcaagcaggatggacttgccgcctttgtcagccggaagctggatacgctagatgaatacatcaagctgtttaacagcaagaaatctgcccacgaatccttgatcggggttttggctacagccttcggtggcaaggaccaattggcggctacgctagcggctgcgaagcggtacccctttatgagcgcaaaggtgtcgaagctgcagataacgatgcttaaacagtaagtaaggggtaaccgttatttcttaccaagggtttcaagattaacgaaatgaatccggcgggtgctccgggtttggaatgttcgatcgcgagagagtacgagacgttctgtgagtggaagggagtgtgcaaacgttccccttttactaaatactcgataatttcttctggttaagtaccaacgttacttgagtacttgctgtgccacttttcattgccgggcgggggaagatcagcgtttggaaagttgagagaagtcggttgatggtccacaagtgatggaaagccatttgtttctacctggcgtctaattggatgtcgttagctgttagctacgtagcaacaatgatcctccattcgaaaacaaaacagctttggtaagttttcctttgtgctcacaatttggtacattacattattgggagttatttatggcacactaaaaagcaatacctccacctaaaaatatgaactgaaatgactactaaggggataccctgttgcctgtaatagtggttctcacggttggaaggtccgcaggtttcatcagccaatagggttttgcaaacgtgcagtcaaacctgcagcgagtcacaaagtatgctggctaacctgcaatgcacttgctgaacacacctgcaggtttacgctgattggttagatttacctgcaacctgcaaatctaccaaccgtgagaaccactaatacacgtttttgcacttcatagggaggaggtcgcactaatgtgtcgtttctgccaaggcaacaaaattcccaatacaaaaccttatattattacatccctcctgtaaaggtttataaggaaaattcatacagcgtcaaatcccaagcaactatccggataccgtgcgaggcaaaactgctgacctcgggacgtcggggatgcctacctataggctagaaaggaaggtgacgacgacgacatgaccaccctttcatcaaacgttcggactcgagtttttagtttatttgtaaaggtattcagatagctttgattttaattaaagctatctgaatacttgaaaataaatattaataagtataccaagatatgtggaatggaacctctggatagcctagctacttaatctggtacaaggatatcattattggtacttaggagagaatgagatttcgtatctgtcagttttcggcagccgatgatgaatagctcaaagcagtctaacctctcagccaggttgaccagattcactatactctaacaaacattttccaaaagcttgctaaaagggaaattcaaattggaaggggcttaggtttccgtaaatcacgagcatctccatcacaggcgatattctctatatttagttggtggagcattgaaatatgaagtcgagctcccacttctattcccaaagacaacagaacgaaataggcccttcactgtggcagggatgccttcacttaggaataaaagtgttatcatgactactgaaaggtaccatggcatttctagttgggatgcgcctgtgccgacacgattgggtttggcactgtacatacggggtttgcctccatgtgcaatccttacaacctcctccatttagcagacggcgcgattgaaagcacgtacagtaccaccaacagcgacttgcatgcactgttcgtaagcggtgctccctctgcattccgaaggtacgtcctctcacgaccaagtcacttcagtttttgccgcctccaagtcctacatactaaactatgcgtcccgaatcgatcgtactgctagcagcggctgctctcctggtgtgtgccgatggcgcctccgccaaatcggtggctgtcgacttcccagtcacaatccacgatagccaagacgccattcccaccaaaaggttgctaaggagttcagaggacagtgaagagagggtcggctttgatacacttacgggcctggccaaggcgggcgcgtcgaaggtcacgggcaccaccgtgctggatacgtggctgttccacaacgtgaatggggtccaagttttggcgaagttgcagctcggtgacgacatcgcggctgcgctgacgagctccaagctgaaaacgttgcgcaagtacatcgccatgtacaacaacaagcacacgaacaccccgacttctttgatcgagacgctcacggcgcactacggagacgacgtcgtggcaaaggcgctcgcagtcgctcagaaacaaccgaacacggaggctctcgcaactcaattacgcaagaatcaaatggctatttggatgcggaaggacaggaccggcgtcgatattttcaagctgttgagctccggcgacgatggatacttcacgcttaccaacctggagatattggacgactacatcaagctgttcaatcgcgagaaatccgctcacgaaacgctgctcgcgacgttaaccacgggcatcggtagcgaaagaagactagcggagctgctggtagtcgccaaagcaaacccgaccacgagggagaaggccttggagttgcagtcggcgctgtttgacaagtggttggcgaggaaattgcgaccggaaaccatcctgagaggcctaaagctggacgataacgtggagaacgctctgaccaaccggaatctgcagacgctgatcaactacatctccgtcttcaacaagaacaacccgaccagcgaggcgactctgattgggacactcatcgcccactacggcgacgatgttgtcgcgacggcgctactatcggtgaagaaggttgcgggtacgaaggatatggcgacggtgctgcagattcagcaactcgggcgctggttcaagagtggcaagtccgttgacgttcccagacgatttgtacgaagtcattgcaagccgaaagttggaggcgctggacgactacgtcaagctgttcaaccgggagaaatctgcggatgaatctgttattaaggctatggcagcggcctttggcggggaggacgaagtggcgaaggctttggagactgcaaggcgttatccggctctcaacgcgaaagccacagagttgcagaatgcgcaatttgcccagtgggagaaggaaggcctgaaatcggaaggcattcttgccaaggtgttcaaaattggcgagacggaagctggaaccggtgtggaggaatccattgtaaaacggtacacgatgttctagtagacgaatttgatcaacgtgttcaccgttgcgaagtcaaggcgctcgtagaaaaaaatatggtgtgaaggagttagttggaccaccgaataattgaatcaacactttttttcgattagattttctatcgcggtgagctatcgacataacagtagcgaatacggagctttctaataactatgcgagaagaaatgggatcgacgaggaatatcatgtttcacaacggcaacaaatggctgagcaacgtggatacggattcgtaaagtgagctggactactttgatctattctcgcaagttgggcaaaacctgcattaagcatgtctcaatagtgaagtatctcctttttcagccacgaggccagatctcgacagtatccgaacgctctccagctttcacccggcttgtaaaccaagtccgtcgtgtgtttttttagctcttgcccataggaccattcttgccaaattagtgctgccaaagcatttcaacaaaaccttatccattgtctctcttgtcgagcttgatcaggtacttggaccaaagctaggagttctgaattgcagttttccttcgagattgaagagctcgttgtaatctcggcggattgtttacaagaaagtgttagtggtccacggcaggcatctttttcgtttcagcggaatttcatgaatgtccctttactttgtgtgatatccagggtcgatattgaggtttccaagcggcaagtctctgcttaggacacgccgacctgaccatcgacttacaaatgcactcgtgtctgcccagaaccacgcaaatatggagcaactgcgcacggatcagctactgtatttgtttgactgaactaggacaaatccgtcgtcgatgtcttctagcgcttgaatctcggcgacgacgggtacttttgcgcttatcagcactaacttgggtctgcatgctgagattgctcagagccttcgcctgttttcgtcaataattagactcatcaaggttgccagccacttgttctacagtttcgattgcaactctaaggcttttctctctcgtggttagatccgcctttgcggcttccagcaattccgccaactccctatcttcacagaaccggccgttaacgttccccacccaaagttctcgcaaggatatgccgtcgtccaacacctattttccatcttcaacgaaaaaatatgaccggcgaagtctcacagcttggaaacgctcacagcgtactacggcgaagatattgccgcgaaggggtcagtatccgcgaagaatcgcgatagtacgaaaaaatatcgcgacggcactgcagacctagcagctggaggggttgctgaacaatggaaaatccggtattggataatgcaccccgaaaacgccccaaatcccaaagtttttcccaaatgatttaagaccatgggaacgttttggtacatatttaggacagaataaccttcagtatgaaagagccgcacagggcggacactcgcgcgttggctctcgtctgcggacttagcgacgggtctgcggggggcccgcccctctctcgcttcgctcggggggcgccgctgcgcggcctgccccacccccttgtcccttacgctaagttcctcgtctcggccaggcgcggtgtctagaaaaaaaatatcgggttgcagcgctcgcgttcgctcgctcgcacagacacgcccccgcctaatcggcgggtgttggcgattagtgaatgcatcgagtgaggctcgcgctcgcgtccgctcgccctcgcccatagccttttgaccataatcagtcaactccgttttggtacatatttgggatagttttacgagaaagcagtcgtatacttggccccaaatatgtacctaaatgttacagagacaattcatcatttgggacatttggggcgatttgggcacatatttgggatgcattatcagcttccgaaaatccgtcgacagtgtcttcacattgctgaaactatcgaaagatggcttcgcaggcattgccagcccgaagttggaggcgctgaacgactacatcaagcggtccaaccgcgaaaaatcggcagacgaattcttgatcaagaccctggtgataggctttggcggtgaggacgaatttggcgacggctttggagactgcaagccaatacccacttctgaatgcaaatgccacggcgttgcagaatgcgcaattctgcgccgtgtaggaggaatgaattgattcggacagcgctctagcaacgttggcggtacaagcattttggagaactcgattgcaaaatgattcacgtcgttttaggcgagaggagggcggggtcgtgcacctcgcggattctgcaccgggtacaatgcgatcgccagatacttaattcaatcgcctccttcttcagatttttttcttagattttatttttgcgtttctgtagcagcaacgactccgatacctagagtagagagaaaatatgctcgtagatttacctgctgatatcagtccttaaacagggctactttgtctatcacaaatgtgaaaacaaagagagagagaaaatcttctgtaatttggaataaatactttcaagacgagagaggtggtcgcatgatcttgtgaggtacgtattaaatcgcaccgatgaagtatctgtacgcgtgcacaagctctttgtctttcgcggcccacagcttctgattcggtagttctcccagtttcgatttgatggtatccgagcgcactcctgccttcatgcattttgtaaattgcaccgattgcagctccgtcgcaatttttttccagccccggcttggacgagccctgcgccgaaatgatcattcttgccaacgtggcctcgtcgtagcgcttcaacagagcctcaagcattgtcgcgcccgcgttcttcttatcgagtttggtcacgtacttggcccaagcgaggaactccaagctgccgaacagtccattcttgccttcgagattgaagagcttgaacgcggcctccgcggacttcttccgggtcagccaccactgcacttgagtcttcttggcgcccgttttaatcaagttttcgagaccagcgatcgcaactcccctctcttcttcgtctacggccgctgcctcgtcaactcgcagaaatctcggtaactattccatcagtaggcgaacggaccgctgtcagggaggccgcggtctcagatgccgcactggcaggggtaagaagggtaacagcagtgtagttgagacgcatggccagagtacataagaaagattatttcacgacttcattctacaccgtcgaactttgttacaacactttcagcaattagaggaaatggtgagcggagtgtcgacacagccccccctattgtacgcgtatttgtacttcgaagaaaaaagagctctcgtacgcccgcaaagatttcatttgcttagtactgtagtttccccctaaagactctcttgttggtgcaccccgcaaacaagaagaatgtagcatgaagaatgcataaattttacctcagtgagcgagtcttgcacgcgcctcaagagccatctgctcccagctcgagtagtaaaggttgatgctgcagaccgtaaacgccgtagcgatgcccgagccgaagccgatccagagcccttcaatcccgaatccaaagtggaacgacaacaaggctcccaatgggataccgataacgtaaaacgccagcacattggtttttgcagccatgtcctgccatcctgcgcccttgtagatgccctgaatgacgcagttcaacgagtcgatgatctcgtagggcaccatcaccaacagcgcgtctgaggcgcgctgaatcgccacaggatcgttgatcacgagcagtggaatctggtggcgaagcagatacacgagcgcagcgaagaatcccgatagaacgaacactgtggcctgcgtcgtgcgactgataatcctcgccttcttcgggtggttcgcacccagacaattccccacacggatgttacttgagaccgagacgcccataaacaccgtataaatcgaagatgccacttgcatgagcaccgcgtgagcactcacggccacgacaccgtcaggaaggttccctgccatcaccgcaagcagctcgtacgcccaccattccatcgccatcataagcaaactcggcacactcaagcgcgtgaacagcgggacgagcgcccacgcctccttcatctgccagccagtccaccatcgcctgtggtttccactgaaagcaaagtacggcaccaaacacagcggcagaactatgtatcccaacgtcctggatagcgctgcaccgtggaatcccaacgacgtccagtacgtgagcacgtatcctccaagcacattgacaaacgttcccaccagcgcgaacagcaccatgggtcgcaccacattctgcgcctgcagcaccttgcgcagcatctcgtagatgaacaggaagggtgcaccgaacacggtcaccctcgagaactctccagccagcctggccacctccgggtcctgtccagccagcagcaagaagtactcggcgtgccagttcatcagaaacaccggaatcagacacgagcccaccacaatcatcgccgactgcaggtagatccccaatttctccagcttcccagctccgtaggcctgcgagcacagcgtatcaagccccgacgtgaggccgaagccgatggacagcgctgtgacgttggtgaacatggtggagagcgtcgcggccgccacgtagcgcttggtatccggggactcgatgtgccccaccagtacaatgcacacgaggccagggagatactcgagcgtgtaggtgacgacgatggggtaggcgagcgccatggtcttccagaactcgtcgacggccacgggctcgggctcctcctcctgctcgtgggtcagctcctgcaccaaggacgcggcgtcgctctccgtctcgtagtcgcggatcttgaccacatccagcgacgccgcgtacgtggggctggcggccgggaagctcgtaccgcgcgagatgatggccggcgcgaagtcctccacgtccacgtcgcactcgttcacgagcagcgacgtctgctccgtcgagtccgccattttttcccttctactgatcgcctgagactgacgcagccaaagtgcaaatacactcaacttgtagttccgacggtgtggcgcacatcagcgactggcctcgagtggcgtatgcgagtgcaagtggatgcacttgcttggccaagtacctcggcaacgcaccaggacgttagattgcttcaagttctcagcacagctggcttcaagggtaacgttacagtaaagattgccacgaacgcttcggcatgctcgagaaggccaaacgcatgataagactgatgttaatgacacgaggccgattgcttcctagcagcggaaggcagcacggcacaataaacgcgggtgggatagatcacaacatcaatcctagtattttagaaattaaagcaaagaaaggcttgaaagtaaatgggcggcaggcgccccctcccgagcgcgcaccgaagcacttaagcctcaagatgctacgcgccggcggcggcgtgtctgccccagattctaagacgagttgactcctctgcaggtcgcttagaagcacttgcggtgcacgatcgagggtcccgactcgtcgtactcggccttcgagatccacatctgctggaacgtcgacagcgacgacaggatggaaccaccgatccagaccgagtacttgcgctcgggcggggccaccaccttgatcttcatggtggacggggccagagccgtcagctccttggtcatacgctcgccgatgcccgggtacatggtggtaccgcccgacagcacgatgttgcagtacaggtccttacggatgtcgacgtcacacttcatgatggtctggaaggtgcagtcgtggatgcccgaagcttccttaccgatgagcgagggctggaacagcacctcgggggtacggaagcgctcgttgccgatgacgatgacgttgccatcgggcagctcgtaagacttctcaaggcccgaggactcggcggccgtcttcatctcctggtcgaagtccagggcgatgtacgtcagcttctccttgatgtcgcgcacaatttcgcgctcggccgtggtcgtgaacgagtaaccacgctccgtcaggatcttcatcatgtagtccgtcaggtcgcggccggccaggtccagacgcacgatggcgtgcggcagggcgtaaccctcgtagatgggcaccgtgtgcgagacaccgtcacccgagtcgagcacgcagcccgtggtacggcccgaggcgtacagggacagcactgcctggatgttcacgtacatggcgggcacgttgaacgtctcgaacatgatctgcgtcatgcgctcgcggttggccttggggttgagcggggcctccgtcagcagcacggggtgctcctcgggggcgacacgcagctcgttgtagaacgtgtggtgccagatcttctccatgtcgtcccagttggtcacgatgccgtgctcgatggggtacttcagggtcagcacaccacgcttggactgggcctcgtcaccgacgtacgcgtccttctggtccatgccgaccatgatgcccaggtgcttggggcggcccacgatcgacgggaacacggcgcgcggggcgtcgtcgccggcgaaaccggccttgcacatgccggagccgttgtccacgaccagagcttggacgtcttcgtcagccatcttgatgcagggggggagtggacttgggagtcttggagatctgccgccaactgggggaaatggggaatgagcctcccaggccacgtggatccacttcgaagagggggagttggagttggctctgaggtgaagcgacgacaggcgggtcttccctcccgcgagatagagagcgggagtgtaatggtgcacgtcagccgtcctgcgagggatcggtatagtgaaaccaagtgaaacgccgtaccatcggcggtttttcaacccgacgctggcgatttgggtgaggaccgtgcctcaaatagacggacggcatcgacggaaaccgtttgacgttgctagcgccaccacagcgcagcgccggcgccgcgcatgcatgtattgacgcactgctccgagcgagcagtacttgtgcggttagctttgttgctctgcatcgcagtagggagcatgcgccggaggtcttcgatttgaaaggtacctatctagcttttcatctccactcacctcttttacggttttctgtcgaaggaaaggggcaagccggcgacacattcaagcggttcctgcccttgcagcactgcacgcagctctcgctctcgctgctggtgtagagtcctttgtagacgtcgaagtccatgttcacggcgcaggccgcaatcatcatcgagtgcgaggatctctctctaatcatgaaaagcacgtctattcttttacaaagtatggtatcctatcctttcgtctatatatatcaaccgccttttgtataatatccccgattcttatcattacatggagccaggagtgtactcaaatccgcgcctcaaacagttacagtaatctgcccgagtaaggaacgcctgatatatataaagacgcagaatatataaattgatgttaagttgagtatacttttccaatatactgatttagttatttcaaaatgaactgaagagcagctttacctacgagtccggaatgattccaacagtggcgtatggtcgaagcactaacctttgaccagacatcctcgcaccacaacagcgctgtcaactggtcgacctcgtagggattatctagcccttcaccaagccggtcgcatcattttaagtgaggcggagacgcttggacggtgtggacttcatgggtggagtgggggaggaggtgggcttgtggggcgaggtgcaaaagcaaaagtgcgagtctaccactacggtacatgtggtttgaagtctagtaagatcgctaaatgcgcgccatttttcaaacgagggtggagagctgatgattggcactagatttttcaccttagtacctcagtttccttgcagtaccttgcacatccccctatcgccacatcgactggaaaataatattaaatatgtgaggctattagttgtacatccgttccttattcgggcagaattctgtaaaatgaggctggaccccgtctgattgtgcggacaattttcactgcagcctgagtttagggatgcgttttccgattttccgaacccgcctaagcttttgcacggcgtttttgtatggcgactcgacttttccgaacccgccgcgcggctgagacacgcccgcgcgtacgtcagcgaggcctgcgctcaatcgtagatcgctctctcgctcgccgcgcgcgatttgcagcgcgctccaggaagctgaagcagacttgttgccttggcctccttgcctctttctctcgctgcccttgctagcttgccagcggagcgagtgtgtttgtcccctgcgtagggcgtcgctgcattatcggtgcgtgggggccatgggttcctgattcgctttcgcctgtcatgccggagatgagcccgcatcgacgacacgccggtccgtatcctttcggacggacgcgagtcggcgtgctcgctgcctctggtggtgtctgtagcctacaggctgtagggatcgttgcccccagctgggcaagctcagccgagctagacgcagatgccgcgtcctgaggccgccgaggcctgattcaggcggcaatgcggggccagcagcagccccatcgaggcgagctgcgtccaggttgaagtgcgttgtctgtccgtgcggagactcgttggactcgctatggcattggacgcgcgcagcgaggaagggccagtggctctatgcttgtcgcgctgcaggctgcagcccggggctcgacaagctccactgcagaggcgatggcgagcccacggtgtcgcgctgttgcagtctgcctggtcgcacgtgtgctcggcagcttgtcgcgcttggcagagactttgcctgtcttttgccgccgtcgactcagacagcctcgggtcgactaattgtcctcggcgacatgcagctcttcccgcatggcgcatcggcctggctggtcgacgccgcgatcgatccaacttggagtgaagtcgaagcagcaaactgcggtaaaactcggcgagtcggtgatccacagacgcaatctttcgaccaccgaattaataattgctggatacggtcggggccgattttggcggaatccagcgggagctttcgagctctttggcgaggcgagttctttcatggccaaacgtgtactatacctttgatcagaccaccaacctctaatgccataccatcagcttttgaagcagttcctcttcaggttgaagcgtacttcaactggcctggtatgatctcacaacaagtctgggttgtacgtttaacggctttgtgctttcgtccaagcttcatgccagcaatatcattcctgcgagtctgacacgtacggctcaacaagcgcagccgccttgtttgggcatatgtataggctcaaggctagaaatgttatctcgctcaggcttaccgcatcgtcgttttagtgcatccgtaattgaccacagtgtaaactcacagcgatctgtagcactgatactgaacgcttaaaaggctcgtcaaactgtcctgccctgccaaacgtttttgttcagtgcgctacggcatgccatgggcaatggtaacatgctgctgcggtctccgtggatgctgaagatggtcgtggtcattaccgacaacggcaagccactgcaatgaaacgtaccaggaactgcatacactgatcttccgcagtcgtgaatatagtacattgtatgataccgggaggaagctatagtatcggcagcgtgtatgtctgtatgtcatttaacatcaggaacgtaaggtattctggtggacccaatccagtgcgcctctcgcgcaagatcgccgatgctccaaggttggaatgcccgttatcgacacttgcctcggagatatcgtagctacttagagcggcagcaaacgccaggtcaacattgtcgcgttcgtcattgtcggagcaatctcaacgaacaaccctgaaggtgctgcgcaacgctaccccccccccctctactatatcgcgggctccactaccaaggtgtgcggaaacatcccatttgctagttgggcttgaccggccactgtagcgatcgctataacggcatattttgataccatgagtatcagcgcagcgctgcactacattggacctgtgtgtgggcgaggcaattgcaaaggcaaatatgcatgcgtacaaagtagctacgtacagtagtttgagttattcgcgccgcgagagtactacctagtagcacgggcagctaccagcgccaacccctcgtacgcacacaatgtgactgagtccaaagtaatcctacaacatggactattgtccctaccgtgccacaactgatgcgcatctgagggttccaaatactagtaataataataatgttgaggtgtattgagatactggctcacgctgaacgtctaataccccttccgcctcgaattgaagagggctgggaaacgctacttaaatgcaaaaggtatatatccagagggaggactgtcaccgtggttcgccctctcttgctgaccgccagtgagtaaagtccccgctaaggtggctcagtactcctaggtagcgccaatctatcatctcatctgttgtcggttcatcttcctggctgcgtcttgagtccattgccaggttcgctatacagtctgccatcttattatgtcgcctcaagtggtgggtccacgatactatcctggccatgtccgccagcggtcgagcgcggtcataccagccttggagcttgtgagactttggccttcgtcgttctttcatcatccgcaggatcagctggctgtcgccaacaatatgaactgtgggtagcttccgtttggctacaaagagcagaagactgtaaagtccccggaactccgcaacgttgttggtgcatctggtccctgcgagtgatgtactgcatatccagataatctttggtgcacctactccaaattcgaccaggacgctgccactccccccgggagttccaaatactagtagctcgtgcttgcggtgtgtttttacatgcgactcgaacaccttgggtcactggagggacaatgcggtccatgttgtcgaattactttggactcagacacattgtgtgagtacgaggggtcagtgccggtggctggagctctcagcccatgctacctctcgcggcgcgaataaaccaaactactgttggtaactacctcgtatccatgcacactcacctttgcaattacctcggccaaccacataggtttaatgaactgcagcgtagcgctgattctcatggtatcactatgtgccgttatagcgaccgccgcaatgatcggtcaagcccaaccagtgaatgggacgtcgatcaaatgagttcttttatacaataacgtacacaacgtgtcaagtatacagcgaaggaatcgctcgcgctgcaagtacttacagtagtatgttggtacgtgtcatcgcgtacttcacgcgatgggtcctgacaacagcattcctcgcacgttgaaggtagcctcgaccagcacacgcaacttagccgcaacttagtcacttcaacataatacttggtgtctgccacaccatccaaccgttgttttttgcattcaaccgtcgacgtaacgacactccgccgttgcactcactgactggtccccgggcatttgcgtcagtatcccttcgactgcggtgcactgcattgctccaatatggcgttcgagccgcgcagcccaacgttcgcgaaatatggcgaggagcgccagccgctgctggactacaagcaaaaacacgagacggtcgtggggatcgccggaagcctcgagatcccggacgaagccgagccccacgtcgtcgatgagctcaagacgctgctcaagctggtgtaccccgtcgtaagtacaataccatcgcgaatcgctacgcgtactgcactaagtagctagcgttatcacggctcttattcgcgggtggaaaattaacggagagcttggtgtacaacacaggttgtgacgtctgcgctcgagtttctgccgggcttcacgtgcatcatcttggcggggcacatccagtccccgcgcacgcagcagtatgtagacgcagctacactctccaccatggtgcgttgcaaatgaaaaaggtgactggtgcattggtattgaagatttgagctaaccactttttggaaatgtttgttattgttgctacagtttatcaacatcactgcgtactccgtcggctttggactcacatcggcgctggacacgctgtgctcgcaggcgtacggagcgcggaggtttgagaagattgggatttacttccaggccggactgcagattatcctggcgtgtctgggaccggttttcctgttgaactggtactctgagagcttcctgctgtacatggggcaagatccggaggtggcgcagttggcgcagagcttctcgcggtggatgctgcctggcgtgcccttcgttttcctgtacgaattggtgcgcaaggtgctgcaggcccaaaacatcatgaagccactcgtggggatcgcagccatgggcaacgtcgtgaacatcgtcacgggctacgtgctgacctaccacacgtccatgggctttgagggcattgcgctgtccaggtcgctgggaaatatggtgctgccattgctgctgatcccatacttctactaccacccgcaccacctgacccaatggtggcgcggatggaatatgaaggaggcgttcgcgcacgtcgcaatgttcctctctttaggggtcccgggcgctttgatgatgacgatggaatggtgggcgtttgagctgcttacgttgatggcaggcatcctcccgaacgctgtggtgtcggtcagcgctcatgcagtgctggtcaacatcaacaacaccatttatatgacttttgccggtctcgcagtcgcttcaaacatccgagtgggcaactgtctgggtgccaacgctccgaagcaggcgaagcttgcgtgcacggtgtcgctgctgctgacgctgggcatttcgtcaaccttttccattttgatgtacgtcttccgtggcagtatcccgagcctcttcctcaacgaccccaagggaattgcgcgagctgcgagcgtcctggctgtttgggcgccgctggaagtgctggacgggctcaatgcagtggtccaggggatcttccgaggtgccggcaagcagaaggtggctgccaccgtgaatgctgtagcctactacattttcggcatcccggtggccggacttttgggtttccactttgtgctgggcgtcgagggtctctggctgggcttcggcttcggcatcttcgttgccgcgtcgctgcagttctacatgctgttcgagcgctggacgtgggcgaaactcgccgatgaggctcagaagcgcacggccgaataatccaactggtatagacttatatgaccggccaagaacccgactaagtagtagagaatataaaacaatccactcactaccactgcgttgcaattagagatctctgctgactcacatgtcaacgtcaccagccacgcgcattgtttggatcggaactcgttgcagaggccaactttccaccggtcgacttgtagccatcttcatgaccagaccgccctctccgatcagttgctgctttcgcatcagtgattgcagacgccaaaggaaattatgtatcggagcccttgccccctcatcacgacaccaccttgattatgggattctcgccggatgtgttccacttcggcatcgggtggacggacggcggggcagttcgaattctgcgcatcagggggaagacagccatggtggcgccgctgaccttcgagcccgagcctgcgagcccaagcgagagccgaccgctgctgctgcagcagcaactgcagcatgacacgctcgtggccatcgccgactgccacgagctcaagccccacgagtcggaaccaaatgccgccgaggagctacagacgctcttggagctcgtgtacccagtcgtaagcaagcgagaaacgcaaccaatgagctacactatcactagactctaattttttatgagcaggtgggcacgacggcgctcgagttcctgcccggactcacgtgcattgtgctggcgggacacatggactcgccatacacgcagcagtatgtagacgccgccacactctccaccatggttagtactggatggaatgcatacagttgacaagtaaactagcactaactggttgactggtgctgttgctgctagttcatgaacgtgacgaactattccgtgtgcttcgggctctcgtcggcgttggatacactgtgttctcaagcgtacggtgctcgacggtatgacaagattggcatctacttccagtccggagtattggtgctgggagcagtatttggacccatttttctgctgaactggtacaccgagccgctgatggtgctcgtgggccaggacccggaggtgtcgaggctggcgcagatcttctcgaggtggatgttgctgggaatgccgtttgtggtgctgtacgagctcatgagaaaggtgttgcaggcgcagaacatcatgaagccgctcctgacgatcgccaccatcggaaacgtcattaacgtcgtgacgggctacttgctgacgtactacacgcccatgggcttcgagggcatcgcactatcgaggtcgttgggcaacatcacccttctgctactgttggtcccgtatttctactaccacccgcaccatttgacccagtggtggcgcggatggaatatgaaggaggcgatggcgcacgtgggtctgttcatgaaacttggggcgccagggtgcctcatgatgacgatggaatggacggcgttcgagctgcttacgctcatggcaggcgtgcttccgaacgctgtggtgtccatgagcgcccactccgtgctggtcaacatcaatagcatcatctacatgatcttcgcagggctggctgtggctgcgaacatccgcattggccattgccttggtgcgaatctgcccaagcaggccaagacttcatgcacggtggcattgacgctgactctggcgatctcgctgacgttcatcgcgttcctgtacgcgactcgctggactctacccaatcttctcctcaacgaccaagagagcattgctcgtgccgcgagcgcattggcagtgtgggcgccgtttgagatccttgacggccagaatacggtgctgcagggcgtgtttcgaggtgcaggcaagcaaaaggtcggtgcaatcatcaacgcggtggcctactacgtgtttggcaccccgctggcggcgctgctaggattctattggacatttgatgtcgagggactgtgggtgggcttcggcttgggcatcctcgtgtctgcgtcgtgtctgtactatttgttgttcgagcactggacctgggacgaacttgccgatgacgcccagaagcggacggctgcttgatgatcctttagcaagaggttgttgctgaaaaatgtggtgtgtgttgctgaccaagcaataagggaaaacctattgctgctctatcttgatagagcagttatgatagtagaccagttggcgttcgagctcacaaggatcatactgggataggaagcgacgaagtgctgattgcccagcccaaacaggattaatttgggcgatgtccccccgtccaatcgacaccggtgatgaaccggtaacgtctttaggtcaatttacagtaattgccagattccggaccggaatccggaaacctgtcaaacctgcaatagagacacactggcgacgcatagaaaacctcgtgccaatgaacgtcgacttatccattccggacgggagtgtatagggctgaaattcgtacttataagagatgtgtaaatcctctccgcttgttctctctcattcggcgttcttggagacgcgcggtggactcgacgagcgcggcagtaaggcagacagcggacggcagacagcagcacgacggacagtgcgcgcgcgcggtagcacgccaggcagtgaacggctggcagcggcgtggaggacaggcgcgcgcgtggcagcacggcagacggtggacggcaggcagaggacggcgggcagctggacggcgaacagtgcgcgcgcgtgcgcaagcagacccgctcagcaccggtgctgcagacgacgctggactcctagaggtaggtctctcccttatccacgcccccgtagctcagcggaagagcgggaggctacgccttaaggccgctggttcgaccccagccgggggcaaatttactgtgttgtgtattgtgtattgtgtattgtgtattgtgtatggtgtgttgtgtattgtgtattgtgttgtgcgctgtttgctgtgcgctggtagctcggctacgcggttacgatgaacgtgaagaggaaacaggaggcgttgagatgactgaggcgaagaagaggaatgcgaccgcacgcacaaaaggatgctgcaagaggccgcacaggtgtttcaagacactgaacgacgctgtgcggctgtgtcaggacatgctgtggcgggccagcgacgaagtagcgcacgaaggttgacgtggggcagcagatgcagacgcgggagcagcgcgtgcccgagcgtcaggtggagacggacgcgccgcaagagtagtatgcggcctacgaggactggcgacgcggttgggtcgaacgatgagcaaggaggtgggaagaggcagagaacactgaaggagatgaagcggccgggaaggagcaggtgcgcgcggagctgtgctcggcgcttcgacgcgatgcagttgaagtatgccagacaaagcatcacactggtaagcagacgcagcagctgaaataaaagccggagagcgccgagtcgatggcacgcagcagcagcggtcatcgtgacgacggagacgggtgcgccccaaggtaatgaccggttcgatcgaggtacgaccgcaacttcccctccttcacaaacgctggtgtagctcatcggaagagcaggaagcctcgcttccaggtcgccggttcgatcccggcctccagcatcttggttggtttaacttgtatgtatttgtatgtggtttgtttctgctatgcatgatatggatttttgtataggctaagcgctaagatcgttggccgttcactgatgcgttgcaggtgtgtactcgtcggagatggagccactcgccttcaacgcaagatactgtgcaccgagtgctttgtacgcctctggatgcgatgctcgcaatgctcgccagcgcttgaggagcgacgaagcttttgtggtcggcttcttgccgtcgaagctgctaaaacggtcgttagcagtgcgatccagcaagagcgccagctcccagaggtcgtgcttccaagtctggtacgcgtcgccgttggatcgatgcggtggcttgagggttgtgcaaggagtctggtacagtacgagcatgatattcactgctgcttttgcgtctgcctgcttgttttgttccttcttacctttcacagattcccatatttggtgtatgtaccagttgagcgtgcagcctgccagcgtagaggcagtagctggagcaggtggcggagctggggcagcgggcgaagttgcgccggcgttagcatctgcaatgaggtctgttgtcgatggcttggtttcttccagacgcgcaagccgctcatttatctcgaccaactgcttcagtatgttctccatcgtcgatgcgagcaacgtatcgcctccactaactgtattgctgacttgtgcgtggttcgttgctcgccagtgcgcagtgagatgctcgccccattcgcagcacgtagtgatgctgatgcgacaaccaagaagcgcgtttgtcgatgcgatcgagcgatgcagatgatactcatagcacgtaagctgcacagttgggtcggccgatgtactgtgtgcagcgtcgagaactgtcttcaggtgcatcaagagggcagcgaaggtggcatcaactacctctatggctacattgtaccgcacgtccggggagccaaggacatgctggtacagctcgccccgcaacgtgacgacttgcccaaactcggactccgagagacgatgctgcagatcgccgattgtcggcgttgacacaggcaagtctggcaccttgtatcctgctaaaactctacccacactttggtcctcacgcgtcgtcgttccaatgtaggcaaaggccttcgtcagcgactccagcagccacgcacccctcgtagatatccactgaacggcaagtttggggcacgcgttggcatacgccgctgcaccgcgccgcagagagtggctcgtcatgttgggcgtcgctgcctgagctgcggcaggggacatcttgtttacggtatcgcggataacctctgaaatatagctagccacgctaggtcgtttgcgctctttcttgagagatggcttagcagcttcatcgttggcctcctccaagctttcccaataaattacagcttcctcctgcgagtacgtgcgacctccaggtagatccggatcagcaaatcggggcaccaaaggaaataaatattcggaaggctggtcgtagcacacaaagagcatcccaaacgcatgcagcatgcattgctgccatcgctcgggggagttgtatatcgaaacaccttgaactactgaggtcttaatccgcgcaatattcaagaagagctcccctgatgctgcggccgtcaactgttgcttccgagcgaagcaagtgtcaatagcacggccgaatgtgtgccacatcatcgttaatagagcttcatcatgaacattcttgagtccaccagcaatatcggcgtgcatgactaggtgctccacaagtgcacacaaatcatcgactttgcacccaggcacatcatgcttctgcacattcgcgcgtaggttccgctcttcaatagcgctggccattttgtcgcgtatttgggcgatacgtttcgagtcggatagagaagtcgggtagcgttcgcggaggaggttgagaacttgcgaaaagtagcctagcgcagttgactgagcaagtaagccatccgcggcacgggccctgttgctctttttagtctgtagaaatatcgaaaaagctgtgagcaatgagtagaagttttgtgtcggaaggctaatacgtttgctatcgaactatgcatgctatctagcatcgctttcgacaatcttgttgaagagaggaactccccaaacactttttctgcggccagttcttggccaattgtcccagccggggtgtcaagaccgcgagaagctcgcttcatctcctctctctgtcttgaggcaagtccgaaattgactctagcagcttctacgttggacctctatctatagcaaagcaagctctctcgcctgctgggatgcgagacttctttgggccatctttgggcgttttgttccggcacgtagtgcacttatctgataagaacgacaaacatcttcggttttgtatgactacttatttgcgcgaagaaggaaattccggacgattccggaaataagatgaaacgaaataaacctaaccctaatgagcgacgattggatgaaaataggtcactgaacctcaaatgataagaaacaaatcgctgattggctacagcgaggtggcaagcttatcataggggtcgggtgtccggccgaatactacttatcctacagtaagagatgagcgtaactctccggtctaatatcgctaaaaattgactgagttgcgaaaaaaaactcatttactccgagccatgcccgcactctcgcctccgtaatgtcttgcacgataatggtggggagcagcaaaaaatacaccagatgcgctggagcgtcagctttccaatgctattttcattttgatcaaactctatttagttgctgagatatggcccactaagctaataggccatattcaagtgaaaccgagaagtagatttcagcgacactagcgcaacgcttcggtattgagtctaaaatcggacgcattaggctagcgggtgtcgcgtaaggtaccgcgcgtacgtcgccacaagattattgtctcgctgagctgcccaagctcggttcgcagtaggtagcctcgcatttagcatcgttgcgatgctgtctgtcgacttgctagcttgtctccactgggcgaacagtgctgactgcaagtgcgtcgcaagacctccagtacttggagaggcctttgccgagttgatgtacctcgccagatccgcctcgtcgtagtgcttcagcatcgtcttgagcattatcccgacggactcgcggtagttggtcgggtttagcatgatcacacgactggcccaatgcttcatctcagtgacaccaaacaggaagcccttcttgtcgtggaggctgagtcgcgtgaacaaatcgtcgacgtattgagacctcgtgatcccggttttgatagcactcgcgaccttctcgatagctcggtgttacctctcttcgtggttgtcggctccttgagggccttcaaaaacctttggacaccggcgtcctcctggtcgcttgcgattgaatgagtcgcagtcgacaagcctggcgacgctacggaggcggcatcgacacctgccagaaaacccgctatagcaaggagcacgaagtagtcgaggcgcataactggagcgaagctgcgaagagaattgcggcgtgagtgtagggcctgtaagccgcgtaattctaccagaggatgagagagatacggttgccacgacaggtaactcgtcgcatgaaacgtgcgaggagatggcaaccaggatgtggtggtcctggacaacggagtttgtgccacgactcgcgccacagtaagcttacacagaacatgtactgttttcttcaagccgatctcaagtcttgatccccactcagcttggcgaacgtaacagcctggaggtacacacactccatggcggatacctaaggtaacgaatcgttattaacgatgggcaacaggttatgctgtgtgtgtactgagcaaatagcaattattgtgcctttccaaaactttggccaatctgacctcaaaaaggtggtcttaagaaggatggggtagggctcaacctaggaattgctgttggccttgcatcggattacgaaagtcctacgtaggagctccgtcttcacctaaagggtacctttttggaaacaaggcgcgaatggccaagttaagctggccatttggaccttcgtaggactaacgagtccttcgtaggactggatcaggccagtgcgcctgaaagcatatgtggcaaatgcatagtttgtccacactcgtacaggcggagactcaggcagcaccgcacccaggtcaccgtgctcagcgtggagctacgtacatgtgctacaggtataaccgtacccgaacgcgctgacttgtcggcctaccttccttttcgctactactggtcttcacttcgtactctaacctggtggtacagtgttgcggaatatctgctctctggagcactgcgtctatgtgtcttgccaattggcgtgatttcaccaaggcttttacggcttttcgtggtcctttcgtaagcggttttcttcagaaaggtgccttggagtgttagtcgaactgtcggtagtagtgcacggtgtgtcaactggctcatcgcccgctctagcgatggagtgatgctgccttctccatgttgtgcttcaatcacatgtacaaagccgactgcttcgattctggggggggtaaccgcccaacaaaacccacgctaccctcctactcttaccatccacaacatatccgccatataggaggagataccagtcttccattgcaactggtcaatctgaagaattgtgaagacagcatagcatcgtgccacacgaaatgcttgtgcttgcgtacgtggatgtgaggtcattcctcggatgacggcttttgtttgaaagtcggcagagttgcatgccctacgtttggcctcttgaacagtaacttggaccccatcgaagatttctcgattgcgagtagaccacaacatgcactgagtgcacgatgtccagattagccagattatttacatcgcgttttcatattcgacgccccagccatcaatacttttggtagcttctgcgagaaaaaccgctgatgcggacggtgccgtgcgagaagctatatgcggtagtagtgcagtaagctcttcgcgatgaagataatgcccagtccactggggaagccagctttcccaaacttcttttttttacaatttaaatcactgtaagtgctgttagcaaacatacaaatgcgtaaaaatttgctaccagtagttccgtcaatgactttacttttagcgtgctgtgcgcttctgggcgtcttctgcgagttccgtccacgaccagcgccccaccaacatgcacaccagcagtgtgactgacacgaaaactccaactccaaatccgagccacagaccctcaacacccaacgcaaaataaaagctgaacaacgccgctgccgggattccacacacgtaataggccaccgcgctgatagtagccgcgaccttctgcttgcctaggcctcggaaaacaccctgaagtacggtgttttgcccgtcgagtatctcgaatggtgcccaaaccgccagcaaattcgccgatcgctcaatactctcttggtccgtcaggaaaaggcttggaatcgaggcacggaacacgtacatgaccacagcaaacgcaactgagatcgcgagcgccaataattgagcaaccttgcacgctagcctcgcttgtttaggtgaatttgcacccagacagttgccaatccgaacattcgcagcaactgcaagcccccagaacaccatgtagatcatgttgttcacattcacctgcaccgcatgcgcacttacggatacgacagggttcgggaggacgccagacatcagcgtgagcacctcgaacgcccaccattcgaacgtaagcatcagaagactcggcactcctagacgtaagaacatccccacgtgagtttgggccttctggagattccaacccctccaccattgactcaagtggtgtggctgatagtaaaaatacggcaccaacagcaacgggagggccatgttgcccagtgatctggacagtgcaattccctcgaatcccatggacgtatggtacgtcaatacgtagccggagacggcgttcaccatggcaccgatggccgcaatggcaaccaacggcttcataatattctgcgcctgcaacaccttccgcaataatttatacaggaacacaaatggcacgcccagaacggcccaccgcgagaaactctgcgccagtctcgacacctctgggtcctgccccaccagcagcaaaaagtgctccgagtaccaattcagcaggcaaatcgggacgaaacacgttgcaatgaccatgcagccagcttggaagtagagtccgatcttgtcgaaccgcttggcgccgtacgcctgagagcacagcgtatccaacgccgacgacagaccagaacccacagaaaaggctgtaatgttcatgaactagccaaaaagaatcagttaggattaactccctaaatttatgcaagaaaactagaaaagtaaattaccatcgtggacatcgtggcggcatccacgtattgttgcgtgtgatgagactcgatgtgcccagccaaaatgatgcacgtgaagcctggcaggaattccagccccgttgtcagcacctaaaaattatagaggttgagtagaatgcaaacatttgttgcgaaaacttcgtggaaacttacgacggggtagaccagagatagtaaagtgcggagctcctgggcgacatcgggctccgatacaagtgcagtatctttgtgactgtcggggattgtcacataactttcaggctgctgcttggcgctgagcaacggcgagcgctcgccagcgtcgtgcacagctgcaaccctccgagctttaggcgccattttagctttttgccgctagaagatcgcaaaaaaataactgttgacggagataaaatagtgcgcacaccatattggtgtacttgcacactagattgtagattgggaagttatccaacgccaacacgcattcaattcagccctagcgttagcgtgaatgaatggagggtggacgcactcatcactgatggcgttggtggcctttctcaggatgtggtgcaagcaattttaatcagagcgtggagaacgttgaggctcggcgttcaacttcagttttgggttggtttttgccacacgcatcatagatgacaggcacttcaacttgcctgctactgaaacggacgcgttaattaatctcgggtccacgctacaagtatgctctcgagcgcgaaataatacatcgtttgttaaaccaaggagcaagcagttgcacctcaaaacacagctacataacctacatacccacacacaagacgagccacatggccaattttactccaacgagagcgacacgaggttcagcgccggcgcgatggtcagcagctcccagcgtagcattccttgcagcgtgtcggcagcgttacgatgtgcgtgttcctccccgcggtagtccgtgcggcccgtccagcgcaactgctggtactcttcgcctgtagccgggttcaccacgttgaggaactcgatcgacagtgacaagtgcgcccacgccagcttctcatccgagtcgtcctgtagatgcgacccatcgatgtccacactctgcgttccgagcacgtatccggtggcctccagcatgggctcgtcggtctccgagtccgaccctggagataacggaggagtcgacgggcaacttgcgtccacgtacgttggcgtgaccattgactcggaggacgcggggattttcctgctggtttcgattaaaaaccgtacgaagaccgagcggaacgtcgagatgtcgtctgtgggggagatgacatccctccctagcacataggcgttcgggttaatctgttgcagcacttcgaggcggctcgtctcacacttgaccttcttgaaccggtcgagtctcatatcgttcgcccacgtcttttgcatgagctcggcaacattcaaccccttaaacttcttggtgaagacgcactccatgacactcccctccactttttgcaccacgtcccagccgaacatttgcatcctccgcggtttaaaccgcccttcacccgcaagactggacggcagcaacaacctgctctgcacgcgacccatggtccggttattgtcgagaatgacgcgggttagatctaactcggtcaacgggtggaagccaaacacttgcgcagcctcgaactcgtccagtcggtcgagttgcatttgcagcgcctcggctccacctaacgcgggctgctggaactgctgcgcccacctgggtccgtccatttccggtcgactctctaaaatccggtacaagtgcaacttccacgctgcctgttgctggatctccgcctttagatacaaattctccgcgccgagtcttttcacgagatccaccacttgcgtataatttgttgccagtttgttgcagttgctgttgctgacggttagagagttcacgtcgtcggtggtggcggacgcgcggagacacatgtcggcgtattgcttctccagcctggcgatggtgctcttcatctccttgagctcctctcgttgccgttgcctcgcgcgccgcatacagtcgcggttcttctgccgccgcagttgcatcgcccccgcgttaggcagttgcgcgcagtccagcacttgctcgggggcaacactggcccaggttagaggccgagttgcatttgccgagttgccttttgccgactttttcgaacctttggcggcaacaggctggctggcgacgcccgcggcccatactgcgtccaaggtacttgggaaaccgaaccctgcgttaacactaccgccacttaaaatgtcatcgccccgaacggggctcttgccgtcgctcgggtcgagcgtgtggacgaactcggcggggctcttgacggggctggcgccgctcacggcctcctcctgctggcgcatctcgtcccacatggcgtcctcgtagctgtccaggatggcggcggcgcccgagcgccagtcctcgtccgcgctagcggttagagacacctcgtgcatcatcgcgcgcgttaacactgtctaaccgggcggtcggtccgagggcaaagcgctagtgagcccatggctgctgctcacttcgacagggcagagcgcccgactctgacgcgctccctactaaaagcagcggcgacttgattaaattatgcaaacgcaatccgatactgagttcagtacaaatgtaacggaaagaagacgtcattccgcttctgcgcgcagaaaaggataaacatggggatgatgggagtcactgggtttcactatgggcgaggttagcacagctgtgttgaagctgctggcaaggcatcggccatcgcctatcgcgtgcagcctcaagcgaaggtcttgccttgccttggcgatgtttcccgccatcagcgttcggcgtcgatagtcgcgcccgcagtaatttctccaggcgctggggttgcgcgagcagtgaaaccggcaaggcgaggtctcgctgccagcttcaaccaagtgcaggggttgggccgtgtacacacaacaggtgagcgcaccgccgccgcatccggctctccatcacgcgttgctttgctttgcttcgtctaacagtccagtttacatgtaaggtaaggtgccagctgcgtgcctacaaccagttccgtgcctacttgttttagccaattagcatcttctccttgttaaactctcgtagtctattggtagatttttccagcgtcacatgcaatttccggtgatgagcctcctgggatttgcatagcatacaaaaatgctatcaaaaagaggcaggaaactggcagctcactccaaatcagcaagcttttcaaaacaataacaagaagttctgcaaaatttacacggaccagcgtgaagtacataaaatcagcccaatcgcgcagatttagcgggtgcaatcagatttcagaatggacaattcaatgaaaagttatcgaaggacggcacgaaactggcagaagaccttattatagtttgcgcgccgatcagggcatcttcccgaaagggagtgttgccgaacacgctgcttcgcgctttggatacatcttcagaattcagcaaaaatgtgaaactgaagttatcagcaacaaaaatcgaagcggcgacagcagcccaagaggcaagactgccaacaacactcaagtaatcttacatgaaacacttaaactctcaccggaaactagtgcacgcaactggtttacgcaactcgcgccactttcttttttatcttctcacataaccgtcttcacactgctcacccgctcgacagcgatatcaagttcagcgccggtgatatgaccagcaactcccatcgtagcagtccttgcatcatgtcactcgcgttacgctgcgcgtgctccggtccgcagtagtctgtccgcccgctccaccgcagctgctgatactcttctcgagtgacggggttcaccacgtttaaaaactcaattgacagcgatatgtgagcccacgccactctttcccgcacgtcttcatccctcggttgttgcgagtaatccgtgtctatactttgcgatccgagcacaaacccggacgcttgcaacatgacttcatcgctatccgagtcgcaacgcggaggcgtggagggggcacttgcatcgatgcaactcggagttgcagttgccgaggactcgctaaccgccgccgcgagtttccgactcgtttcgatgaggaaccggacgtacacggaccggaaggtggcaatgtcttgcgtgggggacgtcacgtcgcgaccgaggacgtaggcgttcgggttcacttgttgcagtacctcgaggcggcaagtttcccccttaaccttcttgtactcgccaagtcgcatgtcgttcgcccacgtcttttgcatcaacgcggcaacatttaatcctcgaaactttttcgtaaagacgcactccatgatgttgccatgcacgcgctgtaccatgtcccagccaaaagattgcatccttctcgttttagcaccagagtcagtgtcagacgacgaagggatcaacagtcgactgtggactcgagaaatggtacggcggttctctaaaatcacgcgggtgagctccagatcggtcagagggtggaatccaaactcctcctgggcgttaaactcatccaaagtgtccaattgcatctttaacacctcttccccaccaagcgctggctgctggaagtgctgggcccatttcggaccgttcatgtggggagcagagtgcaaaatgcacgacaaattgcgtctccacgtcgcttgctgctggatctcagctttcaggtacaaattctcagctccgagtcgccgcgttaactccacagcttctgaataattcgatgccattcgagacacgagagcaccttcagtaggaggggtagacgactggagactgagcttcgcgtactgcttctcgagtcttgccactgtgattttcatgttctccagttcttcgcgctgcttttgcctcgcctttcgcatccactcgcgattcttccgacgacgaatgtccgcggcgctggagccttgagttggggaggaatccgacagtgtattcgatgcagagctcaaagcaggcgatgaagccttagcagtccataacggaacgcaacccgtgtcatgttgcgttgctgcccacaccgcattcagttgcgtggtgtcaagacccaacccgaagatgccgccacagccagctccaccagtcaatggactcagtgattcctcatactggttaccacccccgcgaactggagcgagtgcactaccacccaaacacggaccgaatagtgcatttacttgagcgtttgagctgctggtcgctccgctgatgaggccaatggacgccacgctcgactcgaacggagctgagagctgcgagaggtcgcgcagcgtgtcgtcccttacgacctcgtcgaggctgtccaggacgtcgggggaggcatcggagaccggcgggcattggagatcacgcttcatcgacccggtcttgttgacctcgctcgatagcctaaccagaaacggacgcacgagtgcactttgtgtctgttgtggctattgataggccaatccttacccattttttggaaagtttctggagtgtgcagctccaattgaaacaaatggcaaactttctaggttttacatggcacgagtccccgctgactaacacccagcgaggacgtggaagtggtcttctcgaacggtcatccagccgcggtaagaacttcttagagaccgaacgatgaaaaacattgaatcattattattatatcgggtaggaaactgacgagaagcccaataaggattaatttgaggcttcaaatatgtggtccacacaaaaagtgggtactgaacctatacaaattttcaagtaaaagggacttacagatctaatatttcgaaaacccaaatctacttatttacacaagttttatcctggtagtgctacggcagtagtacgtgtgtccacagcatcgattcaatacaaatttcaagtacaacctccttctatttttgtttttggcatcgacatcgcagattttctatgtattgcaggtgttttacgactttgtatttaatttataaaactatacaggtggcaaatgaaggcagaagatgatatcttgcggtatcgatttgggcggggttctttatggcttctatagcttatagcttgcctattgctttgctttctcatgcatgcaccattgctctgctttcatcaaccattctagcccgtacattaagtatgggctagatggtttcaaagcagtcaactacttcccactacgcttgaagcatgccccgctgccgcttcaagcagatcaagttgctgaagttagacgaacaaacgcacgtagagcaggaactttttcggcatagtgccgcctggccggctcaagccacataaatcaacaggaaccgtggagacgagcgacgatggttgagaactggccttggtcgtctgctgcaccgatgcatcgcgcgccgcacaactccgcaccgtgatgcatgtagatgtagatctgtacagtaacacaattcgacctgtcgaagtgtaaaataaaaagagatgagtaggtatgtaggtggtttagcagctcgctccgacgacacggcagcgagtatgtgcccttagagagcgggggccaccgtaccgccaaagctcgccgcttgatgcgttgtctgtagatgcgttgtgcgtaaatgcgtggatagagtaggtagcagctcgctccgacgacacggcagcgagtatgtgcccttagagagcgggggccaccgtaccgccaaagctcgccgcttgatgcgttgtctgtagatgcgttgtgcgtaaatgcgtggatagagtaggtagcagctcgctccgacgacacggcagcgagtatgtgcccttagagagcgggggccaccgtaccgccaaagctcgccgcttgatgcgttgtctgtagatgcgttgtgcgtaaatgcgtggatagagtaggtagcagctcgctccgacgacacggcagcgagtatgtgcccttagagagcgggggccaccgtaccgccaaagctcgccgcttgatgcgttgtctgtagatgcgttgtgcgtaaatgcgtggatagagtaggtagcagctcgctccgacgacacggcagcgagtatgtgcccttagagagcgggggccaccgtaccgccaaagctcgccgcttgatgcgttgtctgtagatgcgttgtgcgtaaatgcgtggatagagtaggtagcagctcgctccgacgacacggcagcgagtatgtgcccttagagagcgggggccaccgtaccgccaaagctcgccgcttgatgcgttgtctgtagatgcgttgtgcgtaaatgcgtggatagagtaggtagcagctcgctccgacgacacggcagcgagtatgtgcccttagagagcgggggtcaccgtacagccaaagctcgccgcttgatgcgttgtctgtagatgcgttgtgcgtaaatgcgtggatagagtaggtagcagctcgctccgacgacacggcagcgagtatgtgcccttagagagcgggggccaccgtaccgccaaagctcgccgcttgatgcgttgtctgtagatgcgttgtgcgtaaatgcgtggatagagtaggtagcagctcgctccgacgacacggcagcgagtatgtgcccttagagagcgggggccaccgtaccgccaaagctcgccgcttgatgcgttgtctgtagatgcgttgtgcgtaaatgcgtggatagagtaggtagcagctcgctccgacgacacggcagcgagtatgtgcccttagagagcgggggccaccgtaccgccaaagctcgccgcttgatgcgttgtctgtagatgcgttgtgcgtaaatgcgtggatagagtaggtagcagctcgctccgacgacacggcagcgagtatgtgcccttagagagcgggggccaccgtaccgccaaagctcgccgcttgatgcgttgtctgtagatgcgttgtgcgtaaatgcgtggatagagtaggtagcagctcgctccgacgacacggcagcgagtatgtgcccttagagagcgggggccaccgtaccgccaaagctcgccgcttgatgcgttgtctgtagatgcgttgtctgtgcgtagatgagaagactgcggtgaggcaactctgtgaatgaacgtttgaagttgaactgacggggaaacaacggtgcaaccagtccaaccctcttgttacaaaggcgtcatttagagctttcgagataatcgcgtttaccgaataataccttacccgtagagtaccctctaaaacgtaaccataggcgtatcccagggttacacggttacatcaatacaaatatcaagtatatttttatgttgtcgaaagcatattttcgcatgaaataatatgtattatccatgatttatctgttttattaaatgggagggtactattaaatagtgcccggggtattattcggaaatttacgtcagttggcaaatcatttttcggaaataaccggacatcaaaaattcaaaagtgaaaagcacacttaaaaagcgtaaagttactcttattcgattgtttttagcgcaagatttccgataatatgcaatatgttaaaatgaataacaatattgaggtcatacgccccaaataaaatcgggaattaagtggtcccaaatggagataaatttctagcccgatgtaactccgtgcgttcttcacattttggagcgtttgatagcttaaacgaagcacaagacacgcctcgtccgattgatgcggttaaatcgcgcttcgtacttggattcgtaagcatcttttcgtttgaaaccgtctcaaattatagcaggatggaggcttacatggcatcttaccttatttttggcgatttggtgcaatatgttacacaagtgcgctcattttagaaactacttctgggcgtacatgcttatcgaacgtttacgtaggtgtattacgttacaaaggcctatcacgatctacaactttgaattggagtgcgcactttgtgaatttgagtgcgcgttatgagaataacgccgtgcaatcgtgtacattgtaaacgtggtgccgtcgaattaccaccaaaccaaacctggtaggtttagttgcccttctagatgtaacttaaccggtgcgatggtcgtctgaaacacctaccttcaaaactttcgagcaaatcaagcatagctctggtatcgcggtgccccgtatattcaatcaacggccagggtctgcgcggcttccgatacgatattcgtccccgaacatttcgacccgtttcggcatagcttaagatcgcggtgccccgcgttaagaaatcgtcagctggcgtgccacgtcgccgctagaaaatgtaaatatgcacacaaacgttagttaagattgatgaacagagttatggtagcagcgcgctcggtaccacggcagcaagtatgagcccgcggagggtgggggccaccactgctactgagcaggcgctgaaaagtgagaagaatcgctgtagaaccttctgagtgtttgagacggtaaggtttaaacaggccacctgccgatttggtcaccttagggtcgcatacgattcaagcaggaccaaaccaaaaatatagtgtattttagcttcggtccccagtgctcggaatcagtaaacaaaataaaaaagttgggcaataaaataactgaaataatttattgtggttataatgggcctactttggcccactactttagcttacacgtgtgcgcgtgtatgtgaggaatcgtagcttagtttaaattagagctaattatactcgagcctccgagtatagattaatctaaataaacgatccaaataatgtttttgggttagaatgagaactgctattttttatgtttctgacttcctctaaatgaagaagggcgccgccggagcactccccgccgagccgctggaggtggtgctcgaggacgaggcacgagacgacgaggacgcggacgagtcgtcgccactggagtcgcccgaatcgcccggaccagggcctggtccagctccggctgccgcacggcccctcggcgaggagggcgttggccgtgcaggagaagagtgacgcgaggccgccgaccccaccgagtgcgccgaatgcggccgaacgcgtcgacgccaaggagggagagcgagacccggggctacgcagccggcggcacttggactgagcccgccgcgcttggtcctcgctgtccgaagacccggagccgaagagcgacgcgtcctctcgtgcgcgcgctgcagctgcagcggccacagagggtgtataggcctgcgcagcggcgttgtcggaagccgcagtgtcggccacggtaaagggccgccgactacgtcgaaggggcgaagaaccagacgacgtagcggacgccgctcctgacggcctagacgcgcgtgactgagaacccgaacgactcgacgcgccgtgtcgaggtcgccgaaaacccgacgaggacgaggcagcggacgaagtcggaacaggacgggagcccgaaggacctgctggaggggaagggccagtcgtcgagtccgccgtcgaagccgacgagcccgcccgggcaccagagctcgagatagttgaagcaggaacaggaaccgcggatgccgcaggaactgcggcggacgtaggaatagcagggggagggggatcgcaccgtcgatctccgccgtgaaagtggcttcgagtcgcctaaccaggtcagcggtgtcgatctgcccgcctacacgcgttacgacgccggcgagacgatcggcaagttcgtcgcgcacccgccgcgccagctctcggccccgacgcgcgcctcgaagaatccgacgccaagccacagcgcgttcgtcgcgctctcggatggccatgtcgcgctcctcctccagctcagcgacgcgagcgctgagacgatgggtctgggcgccgactgttcctcgatgctgctgatacgaccgccgcatggacagccacccagctcgatactgcgccgcgcgagatgtggcgcaaagttcgccagcttgagcctgcgccatatcggactcggcggccacacggagagtcgtagcagtagccactgactcctccagctcgtggatacgcgtcgcgccgcggcggagctcctcggcgtgggccactaagagcgcgttgacgcgccgaaggtcgttctacagcgggacgttcaggttctgggccgcctcagtctccgtgcggctctgaaaaggcgacgcacgggccgcgcggagctcttcgtcgaccggggcacgctgctgctccagggcggtcaaggcctgacgagcctgatctctctcggcgacggcaacgtctcgccgctgctcaagggtggccacggcttgacgtgcctggtccctctcggcgacagcagcgtctcgctcgcgtctcagggccgtggaggctcgacgcacttgatcccgcatgtcgagagctccgtcgcactcttgttcgacgaccatgagaacgcgggccacgcggtcacgctcggcgagagcggcgtcgcgctgctgctcggcagtggccacgagctgccggatctgatctcgctcggcttcggcggcggccacgcgcgcttggataggagcgagggcggcttgggcggctgcgaggtcgacgcgaaggtcgtcacgctcggcgcgcgcgtcgtcgcgctcgcgttatgcagcaaacagccgcgctagcggcacggtggatggaggcggcgtagcaggagcgcgcgcgagttgggcggtcaagtcagtgacctggtcttgtgccgcccggagctgagcttgaagatcacgatattgctctgtcgaggagcctcgctcggcgcggagtagagccttggcagcgtcggcgcgctcagcacgagcacggaagtcggccactcgatcctccaggacggcgtagtcccgctcggcgtgctcccgggagaggagcgcctgctcgagccggatcatgcctgcgcgaaaaccctcgcgagcacgatgcaagatcgcgagattgcggtcatgcagcacggacgcgtgagtagccaagcccgcatggtgcgctgagacgagttcgtactgggcgcgcagctcctggttctcgcgctggagagtgtgcgcgtcggcgacaagagcagtcaccgagtggacgggggcgcctgaagccggaagctggacttggggcgcgacggggaggcgaagacgatgcgcgccgagggcgcaaaccgcgcagccagcggcctcgaggtcgtcggtatcgagctcttcctcctcgaggtcgatgtcgttggcgtcgacgtcgtggcggcgagccatgaagcttggagtaccgcgaagcagactgcgagggcagaagacgcgatggtgtcaagacgaagtgaaggcgcacggcaggttctgcgacgacacacccacctagggagtgcgcgtgcgtggcagcgggacgaatgtggtgtagtaccccgcagaagaagtgggcgcaccgggccccggaggaagaaggcgccagggcacgaatgatggacctcgacgcggatggatgggcgcgacgcagggccgagctcgacgggaaagtcggcgtgggtgatgggccgtgagacacggtgccagaatccagtgcgacgcgtaatcatccgacgggtcgaccagcgcgcccggttctgcaaaacgcgccgagcaaaacgcgccctaacccccgccgaccaaaacgcgccgaggtaagatcttgattgcgccacgtaaatcaggttgaagcacggtagtgcaagcacgacagaagtaaggataggcacagaacggtaggcttagcaagcggtagtacagagtagccagtagcaaggacataggatagggtaaggactcagtcccgaaatttctctgaaccacaaagacctcccgtcttctccgaggttccaggggaaccaccaagcgccggcaagtagaaccgcctcgatatcgcgaccccgcgtcgtttgctggttcgggtgctcaccccccacagacccgtgctggaacaaaggcacgttaaacgtataccgtttaggtgggcgcccgataacgcgctgcctaggcgaaggaccgcactggcctgataacagacgtgcacaagacccccgtgtaggcacgataacaccacacaagccccaggaaacgactgcccgatatcgccgcacgcccgacgggaacgccgaggaaacgccggcccgataacgccgcacgcccaaggctcgacgtcctacgacaaggaacaagcgtcaaaacaagaacccccaactccgaagcctgcgaagacttgggcctgtatttcgaagatacactactccaacaaccgggaataatttgctcggcgcgaccgctatccagacgcgccgagtttgtgcgagatcgcattcgcgagatttctgcgagggcgctactccacatcgctttggtcatgcttcgatcttccggctccgcatccggagctcttagtttcttccgcgctgctcgtgtcttcttcttagacatggctccctggttttgcgcggggtttttggccgaggatccaacagctttcgctgctgggtgctcgtccgacggatcgtgcttcgcagcgcgacccgcggggttcctcgggaggacctgtggagggggtagaggcttctcctcgagatcagggtcatcccgatccgcctccgatccgccggtagagttcctcctggcactctgtcggttcatttttcagcgacgccgccggtgatcctagctccgtcggctcttcatctcctgattcgttgctcacatgcgcatcatcttgggactcacggtgaaatcccgcgtcgccaagagatccgggcacgcgcaccattgtggtggagtggatccgctggaattagcagggatcccacactcacatatgcgcccagacaccgactaacggagggggtactccgataaccgtaggttactgagtggctcaccttgtgtacccgtcggcgggctggatctgctctctctcgttgacacgagatgcgcagcgggtgaacttgaatttccttggcgggtacttggggagatgttggggtagttccgcagtgggggttccttcacgcgggtctgggtagattgatccttggtcttggccgtaaatcttgtggatccgataagtaatataccggatccggcgttgttgccttgttgggggtgttgtatccttttcctttacgtcgcttgccgcctactattagcgggggagttggggggcgagggccgaagggcgcgagctgctgaccaagctatccagcagtctgccacgtgtgcggggggcaaatcacttgatgaaagtatgggacaatactaatcccaatactaaggaccaagtgtgtggttcccaagcaaattcgactctgatttatgttaacctgtaacggggttacctagaatagtgaccctgtcactattccgggatggctacatcggtcactcccctggatagtgacccaagtggcctcagagccaacagatacattttgtatgacacaaactatagggaacttaggatttgtatgcaggccaaatctgtaccaacctataaatacattcagtcttagatctaccgcttttcaagtcaagtcgtccccttcagaccagggacacgtgaacaacgggtgttcacttggggtttgtatactcctgcttcctctgttaagaagtgctgtgtgccccatcacacttggtagcacttgtagtcaatcctacgcctacgcgggtagattggactacctgaatcctctgtggtctcatcgagtgagccaagatggatcgtacggagtttccccatctgaacgactcgcagtacgagtccgttcgtaagatggcaggcatctttgggacagatgccctgcgtagcttagcggtggcgatgccggctgagcaggttgagcgtatcaacgcgttcgacacctacgagcgagggctcatcgcccacgttcaagggctgcaggccactgcggccgcgccgaagccggtgcaaccgaagcccctgcggctgaaggttcaccccttcgaagggaaggaaggagacaaccttcacttctgggttcgagaggttgatctcgcgatggacgcggctctcgtctcggacgagcgactccgtgtcgcctttgcgctctccaaccttagtggtcgcgctaagagttgggcgtatacgcgcgaagggacgacgcctggatgcttcgcatcatggtcccagctgtgcgagcagctgcgggccgcgtttcttccggtgaactacgagtaccgccagcgttcgcgcttcctcgcctgcaaacaaggaaggcgcgagctgcatgagtacatccaggagatgcgagtgctcactgcctctttggtggggaaccccctgcctgaacacatcaacgtgaccgtgttcatggacggtctgcgtgtcggtcctgcccgcacgcaacagctccgtgtgcaagcaaacactatggaggaggcgattcagatcgccctccaggaggagtacagtcacaagcaggctcgtaccccagccacggtatggcagagcaaccctgcctctggcggtgcgcctaatgatactccggcaatggagcgatcaacgggccggttcccatggatctgggcatggccgagcagagcgacattcgctgctacggctgtggcaagcttgggcacatgaaacgtgcttgtcccgcgggaggactgaagaagaagttattttcgaagccctttggctctaggggtcgctggcagaagccgcgccccaggaaccaggggaactccggacaccaggagcggggcgccctactggggaaacactaagtcttcatgaggggcgtgcgggtggtgcacgccatggggacgtagtccctgagagtctctgtactctcgaagcggagaagggaagcggtgggttgcttgtggtgcacgcgagtgtaccgggatacgatcatccctttagaatcttgatcgactctggggcgtccaagaaccttgcgcgccgccagactgtcgcacgcagtcgcgacaagtacgccgatgcgctacgaggcagtaaaggcaacgggctggtctcggtaagactggccgacggtacggtggtagaagtacctcgggtccacatgaacctcactgtcaagttcgaggacttcgacagcacggagccgttcttggtcctaaacatggacaagtacgacttgatccttggcatgccgtggctggagaaacacgagccttggatcgactggcgcggcaaggccatcggggccagccgtcccccacgctctgacagagctttggtgagtcatgttcccacctctggcagcagctggggcgcccgcgagggccgccagggcgcagcagcgtctaatgagttcttggggtccgtcgagactgacgacgactccgaccgggccggacaaggcctgagagtggaggtgccggacagcacctaccaggtgggtaacgtaggtccacatgcgggtaacgaagtaccgcaggcagcaagggctgctggagatggcgccgctggcgctggcgtgggtaaccaagttccacgcgaggtcactcagaccgtaactgatgaggaaggcactgcaggcgcttccgatgtgggtaacatagttccacaggaggtcactcagaccataactgatgagggagtcgctggaagcgctcctggtgtgggtaaccaagttccacacggcgaggtgggtaacatagttccacccagcaaggcgggtaaccaaattccgctcaaggacaaggcgggtaacgtagttccgcacgagatcgagaagatcggtggtgccgtcaaggcggcgccacgagacgaagacacccgagggtcacgtcgtaagccgggcctagtcgtgtggccgacgacgccagtcgccagcgactccgagcctccagccaaggctccagccgccgaagagtgttatcacatcttcgacggcgtgaccggtcgtcgggtcaagacaggagctgtcgagcttacagctctgcccgaggtttcagagttgctgaaccttgaggagctcgccatggaggacttcttggccgagctaaaggccggggagatcgcagagtcggttctcctccgaccggagtccacgtcggccgtgttgatctcatcctcggtcatggaccaggcagtcctggaggagttccagagacagcgcgcgtcgcgcatgggctctgagattcttaagaacccccgggacccggtgtaccccttggtgaaggtgtttgaggacgtggtgtccaaggatccaccgtccaatctccctccggacaggggaatcaggcacgagatcgatctcgtgccgggcacgaagtactgtgtcacgaggcaatggcctcttccccgggaggagtgtgaagtcattgatgccttctttgccgccaaggcgaaggcaggcatggtgcgggagtcgaagtccccgcactcgccgcctaccttctgtgttcgcaaaccgaacggaaagtggcgtctggttcatgcttataacaagctgaacagcgcgacagtgcctgcgcagacaccgatcccgcgcaaggacgtgttgctcaacaacatggccggctgcacgctgtatagcgcgctggacctggtggacggatactaccagatcctgatgcgcgagagcgacatcccactcatggctgtgagcacgccgagcggtatgctctgggagtggctggtcatgcctcagggactttctaacgcctcggcaacgttcaatcgcttggtcacacaactgttccgacctttgcgtgcgttcacacagacgtactttgacgacatcttcgtccacagccgtgccgaggcaggccagacggccatggaggtgcatcttcagcaccttcgacgtatgttcgaagtcatgcgggcgaacaagctgtacgccaacatcgacaagtgtgtgttcgcagctgaggagatcaaggtcctaggctgcttcgtcagcagcgccggggtccgggacccggagaaggtgaaaaccatcgcggtttggccgccacctcggtcgcagaaggacctacgacagtggctgggcctcgccaactacctgcacaagtatagtgcaggctacgccgagctggcacgacccttgtcggatctcctgaagaaggatgtcaactggcgctgggagcgtcgccatcaagatgcttttaacgacatcaaagcgagcttacagcgtcctggcattgccggacgagacgaagcctttcagcgtagtctgtgatgcgtctgactacgcgattggctgtgcgctattgcaggccgacgatgaaggccgcgaacgggtcatctcgttccagtccaggcagctcaaggcagccgaacggaactatccagtccacgacaaggagctacttgccatgaagtacgctcttgtcaagttccgagtgcatctcctgggctcgacgccctttgtcgtttatacagaccacgcgtccttgcggactgccgacaacacgccgcatctctcacagcggatggcgcgttggctgtcattcttcgcggaatacaactcccgtgtcgagtacaagccgggcaagttgaacgtgcttgccgacgcgctgtcgcgtcgacccgactacgagcttgctcatattagtcgggtcacgacggatctgtatgatcgcatcaggctggggtaccgagacgatgccagtctcggacctcttgtgcggttcttggccgctggctcggaagccaaggccgagtggctcacgccccgacaacgtgcaaggctgcaccgctatgagtgggctgacggtttgctccactatagggtcgagcccaagtatcctccccgtattgtcgtgcccaacgacgaggatctcaagtacgacatcctgatggaggcgcacgacgctccatccagtggccatctcggccgtgagaagacgtacgcgtctgtctcgcagatgttttggtggcgtcacatgtacaagtgggtcgccacctacgtccgtacgtgcgagacgtgccagcgcgtgaagcctgccggtcacgcctcggcaccattgcagagcctgccggtcccagcggactgctggaagtcgatgagtctcgactttgtcttcggacttccggccgatgaccgtggcaacactggtgttgttgccttcgtgtgccgtctgagcaagatggtccactttgctccagttcgtgacaccgtcactggcgacgaggtcgctcgcctgttcatggactgtaccacggtctgcccgagaccattgtctctgatcgagacccgcggttcaccgctacgttctggcagacgctgtttcgccttctcggcacacggctgtcgatgtcgacggcggaccacccgcagacggatggccagacggagcgcgtcaatcacgtgctcgaagactcgctccgcagcatctgcacggagatgccccgctcttgggctgatcgcttgcccatggttgagttcgcactcaacaatgcggtatatgcatcgacgagctttacgcccttttacctgaacgggttgcgccaccctcaggtcccgctcacattacgaggcagtattgggggttcggtcctaagtgggggagaggctcggaaaaccttttcctcccaagtctcggacgtgagtccagccaccttgcggaagcaactgtcctcgtttgccgaagacaggctgaacataatcagcagggtgcgagacaccatggcgcaagcccaagataaacagaaggagtactctgaccgaaatggaagaggaaacatgaacgtgtttaaggctggggatttagttctcctagatactagaaacctaccgctaaacactgttagctcggtcgagagcaacaagctgaagcaccgcttcattggacccttcacggtcctcagccggcatggcgtggcgtacaccatagacttgcccaagtcgatgacgactcacccgacgttttacgtgggtcttcttaagaggtatcatgaccctctggctctggctgccccgcaggaagcggtgggtggcccggtggagaagagcgcagctcctcgaagcgcggcgtcgggtcgcggtaaggcacctgatacgcgcgctggtcgtaagacggcgcggcgtacatcggagcagcatacgcaggggccccgtacgagccctggccaaactgggcctgatacgagtggggctgctgctgctccggatacggcgcgtggtcatgaagctcggcccgaaggccagcgagctggtttcgcagcgagtcgtaagacgacaggtcggctcgacgatccacacggccatggagactgcgagtttcttgatagagcgaggcaacatcctcacggagccgctccacggcaccaggctgaccagcacgagcggcagcctcgccaccaagaccgacgtcaagcgcgatctcgaggacgtacacacggtcccggagaagacgaatctcctcttgctgcagggccaccacctgactcggagccccagcatacggctgcgtcgtcttaggctcgtagccatggccgtgcgaggccaccgccggccctccttgatcgtaatgggcagatccactaccacgtggaacgagtcgtggaacgagtcgtccgggagcggcggctccatggcaagcgccagctgctcgtgaagtggaggggttaccctgagtcggataactcgtgggagcccgttgagcagctccaggcagactgcccgaaggctgttgcgatatgggacgagaagcagcggcagcttcgtaagtagtccttggcttcttggccggtacccgacggtagcagacgtagtcgcaccacgcccacgctcttcacgagctttggctctcgcctcttgcttcagctcgtccattttcgagtggagcttgcgcttgctcacgagttgagcgaactcgatgcggagctcgcgcacgtccaggattgcggacagtgtgcgatcctcacggatttctttgaactcttggtcggaataccctttgcgctggacgtagcgccagaagaggtcttccacctcgctccaggtcatgttgtcattcggcttgacccagtggaaaccccacacaggatggagtccacccttgtcctccggcttcttgcgaagcgtggtgaactccttcagtgtgagcttgtgtggtgctagtagcacacaccgggcgacttcaacgtcgccaagaaagagtggctctttctcaacaagagcacgctcataggaacccctcgaggtgtacccgccgataaggccacgaggagccgagagcttctccaacagcgctggcgcacctgtgccaggctcgggcgggaagtagccctgcgggtacgtggcatccccgcctgaagaagactcgatggcagtcgtggcagtcggctgcctggcatacgcacccgagctagcagcgtggtattgctgctgctgctcgtcgaggttgttggagagctccttgggctcgtggacggcgccctcctcgtcctcagactccgagtcgatgaacagcttggagctggagccgcgaggcgacctggaagctgaacgcttcttcgccttggcctcggcggccttcgcagcggcagccgctttcgacgcttgggcacgctcacgaccttgtgccagcgtcagatgcttggatgccagcacctccttgggcttggagcccgcgtcgctcggcgacttctcggccacgaccccagcgtcggccatggcgacttcgtcgtgcgactgcttgctgtcgcctgagccggactcggcgtcctccgcctccttctctgacgaggcctttgcgtcggccgaggcgttggtcatgtcgcctgccgccagctccgtgccttcggcagcgtgcgtgctgccctccgagacgttctcgtcgtcgggtgaactctcaccggagtactggaccatcgtgcagtcaaagacggcggcttcccagtcgcgagccgggcttttatggcctcgaggactctcctccttgccttgcgcggcgtcaggagacttgctacgagccccggcctgacggccactctccggcgtgctgctacgagagcgcaccacctcctcggccgccttcgtggcctccatcagcgcggacgactcttccttggccttggccgccctggtcttcggccctacggcccgcggtttcggaggtgctttcgcactgcgcgcactgcgctttggaggcatgcttccggtcgacgtggagaccctgcggcttgctcggcgatgcgccagttgctctgtgaggcccgggagccgaggcgccagagctcgcgccgttgtcgatggatttcgactttacgagtgaaatgtgagtcgccggcgtaacctcgctctgattggtcgataagatcgaatctaagtgggggaagatgtaccagggttacatggaatagtgtccctgtcactattccgggatggctacatcggtcactcccctggatagtgacccaagtggcctcagagccaacagatacattttgtatgacacaaactatagggaacttaggatttgtatgcaggccaaatctgtaccaacctataaatacattcagtcttagatctaccgcttttcaagtcaagtcgtccccttcagaccagggacacgtgaacgggtgttcacttggagtttgtatactcctgcttcctctgttaagaagtgctgtgtgccccatcacatagcctgtacccaaccttcccatccgacttggatcctatccatgactggctctccatcctgcctaattatcccaacatagccactgtaccaataagctggtacggatccgcgcctaatctaggaggtcctaatatagatgaccggatccgacctgaaccaacttcaactgtcctaattccgggtcgtccctccgtgaccgaattaggagcagcgatggtgaggccgagttaaggcggaataagctaatccagcctgcgttaagcggaaacagagcgattggcggttcctacccgccaatccacgagcagactccaaaattcaaggcacccgtcttctgctttgcctacgcaaattagcaagacaacccagagagccgtcaccaatggtggcaagccccgtacaaccaccggaccgatacaaggcaccggcgttgctaaccaggcttagattataccagacatcttgcaacagataagttaatagactagtctgtctctctctctcatacccgccaatccatgccattccgctcgtatcggagatacggtatctccgtcgattggcgtcgattggctcgcaaatgctgatcgcggaagttaggagaagcactcacaatcttaggcggaattagctctaaataagcgttgatcacccttttatgactctaattccgcctgaattaacagacccgccaaaatacgtaggttcagactagtctattcaattatgttatgagattgtctggaatgtcctaagccaggtgatcagcgccggtacctgagatgatcccggtggctgtacgtggctcgctctggtcttaatgtccgctggaagcacccaccaaaatacgtgaaaggcacaataatgtaatgtaatgtattgcgtgtttcgcgtaacccaaaaacactaagctagactctgtattactagtcgaagcgtaaaatgagtgaggcaactggtactgaacccacaaaaaggtacggtgtaccagtgtacctttttccacaactgagtatctgtaagtccgttactacagtacttctactgaagtacccggtacgtttgaagactaccacatgtagtaaaatgatctggggaaatggggacacctctaattactttgaccagcaggttggtcaagtcgagcgatagagtgccgtaatagagtctcgcgaggttatcccagctgacttgatagttattaatacaagtaccgcatttcgcatgtagagaaacacacccatgtcataggtttaggttaattactgcactcgagcctaaaaacaatgtaaaacccaaaaactgggtcacgcgatcatttcgtacacaaaattggcaagatggttggtcatacggatgacgcggagtgatctcctctagaatggcgcttaagctagcaacaagtctaggcgccatctacaactatgttgcacaggaaccacaccacttaaccaattatctacagcgttgcttcttctactaagtactaccatcgctgcagccaggggcggacgcagaaccaaaatctgacgggggtcgggccagaaacagggggtaagtctgtatgcggctcaaaaataggggagtacgtcgatccgacagctcagaaatagggggtaagtgtgatgtcttcccaaaatctggggagggggcggtgcccccctagtttgtatgtaggtccgcccctggctgcagcagccgtgttgtgcgcactcttgcgcgttgtggtttaacctcgcgctccccatatcccgccctcaggcgcgcctcaactgggcccacaccaggcgtggctactaactatcactccgacgaggcgtaggcgcgcggggagggggcagcgcgacgttggcgagcggtgcgcagctcttcccctctgccttcgcgcgcttggaaccggtggctcaatgtgaatgcaaaaatgcgcaaaatacccaaattaggggtgtacttctctggcccacttaagaatcgacaagtcaatttaacctcatttttccgatcccacctgattagctaaatatatgatttcagccatatgattgggtataaagtttgattagagagctcacaaaattgcttagaaaaacctcaaagtttagacgaatgccacgccttgcacacgcgtcctacgacagcgaaatgcacagcactgtatcgacagctaaccaagctttcccatgataccattttggtgtaatatcgccaaatattgtagccactccgcaaaaattcctaatgctacccaaaatcgggcttacaaaatttgttctgttccccatattcctgctgtttttgagcagccaataatataacgcgaaaccaccaaatctcagctttcttttgagctattttctgtctccgacagatttttttgattttgttagagctgaaaaatagaaatgtcgattcttaggtgggccagagaagtatctctgtactactaagtacatgcgatcccacggacttttctttcgcatctctgattggtctaaataaaggtgtatctcttaaaccgctgtagcgctctacatgcgaaatgcggtattgggctttgagcaaggtttggtttgctaagactctcagtccgtatccctgttttacaggatactgtatgtgagtcgaagatttgtttttctacttacaggatacactgtacaagtaccagtatttgagactcacgacagcgatcctccgtggaaatctaattaagtaaggctgctcagttgaatcgaaacaatcggaagtatctctcggccttggctggaccaattcctcgcatacttgccatctcttcttctgatgccggctctgcctcaagcacatcctgcgcatacaaaacactcgtgaatactcgacatttagcggtgcttggtgggcacaaactgcactgcatcgtacccggacaagtcgacgcgagagcgcttctcgcttgggaagtttcagccgcttggactcggccagaatcttttggtactggtactcgatagtgcccttgggaatcgcatcttcctcctcagccttcattccactcggcgccttctccaattccacctcttcgtcatgccaggaatcagaggcagcttcaagtggcacgccgcagttgcaattccgaacgcatcgagacgtgtcgaagcggaagccgaagtgcgcgtacaggagctcttttcgacaacctgtggtcgttttgcagaaggcagcgacgtcctccagttcgcctcgagagctcccgttagacattgcacccgctcctgtgccgtccaagtcgagtctttctgtcgtgagggcatcagctcggctcttgtctgcttccgaatacagcaaaacacacactgcaggcttcccgtcccgcccgcttcgcccctatttgcagcaaaacgagtcagtttctttaagaaaaataatcatgccagtcttgcaactacatatttacaacgcacaatctgctgcgagtaagccgagagagacagcggggtggaatggtgcaccacgaagcgcacgtccgagcggtcgatgcccatctacaataagttaatagaaaacagcgtcagcaaaccataatccaaaagccaagcttcagacaacagagcaacccaccccaaaggcgctggtggcacaaatgatggtcaattgtcccatcatccactgcttgcgcacaaactcgcggcgtttgcggggcaacccaccgtggtagacaccggcatggcacccgacccgaactagagccaagcacgcgtcctccgcctccttccgcgtcatgcaatacacgatcgtcgtctccttgccgaccctcttggcaatgtactcggcagccttcgacgtcttcctcaccacctccatcctcaggttttcacggtccgtcacctgctgaatcaacgccatttctctgcatcggtcctccagcgtcctccccctctcatcgtcagacgcaactgggggcaccagcgtcaagttgaacagctccgccaaccgctcaatgtcttcgtccgataccgacgccgtcgccaatgtgaccggtacgtcgctcagatgctgagtcttccagtggcacagctccaagtacgcggggcggaacgtgttcccccactccagcacgcagtgagcttcgtccagcacgatccgcgcgagtcgagcttctttcctcgctgcacgcacccaccgcctcatctccgcgttcatctgcaaaaactccggcgtcgtgtacacgagcctctggccgtccaaaagttgcgtcaagggcacggccttgttcctctcgtcgccggaaacttgaatggccttgacccctttgcgtttcaacgctgcaacttggtcctacatcataaaaaataataaaaaatgttatcgagtgagatatcttactttccagtattgttgatgtttttcggttcgtacgtgcatgagcgcaatgagtggagacacgacgagtgttgtttggtctgctgcggtcaccagggcgggcgcctggaaggccaaactcttgcctgcacctgtgggcaggtgcaggaagaccgagtaccctcgtgtagccatgttgaccgcggtggactgcgcgtctgtgaccgtcagagcgtcggacgcgtccaactccagcagctgtcgatacgccgcatccagagcgtgttcactagtggcgaaggcgcgcgcaagggcggatcgaggcgcagcgcgggtgcggcgaagcagcaaagactgcatgacgctgagtatatattgtagctattttgattggatgtaaacgacgcaaacgtttcgttgattggttaagactgtagccattatgaaatagctacatttgtgcgcatcaagggacacgaactgacaggtgggctcaggtacactaagcgcagagcttgttccacttcgcccgtgtgctcgtattcaccggtctgctcttcctcgtgctcatccgtgtagccgtcagtggtttgttgctcagtttctccctctgcgtagccatcttggtgctcctcctcctgctgctcggtttcctcctctgcgtagtcgtcatggtgctcctcctgctgctctccagatccgtcgtcttccttgctcgcgtcctcgtgctcgcttgcacttccctcttcgtattcaagcgccacctcctgaatcacagcgcaagcgatgcgcggagtttgagtgccacacacagcgtgcagcacgacgctccaagtaggcgaactctcggacggcagcgggaagtgctcgtcggtccactcctcagacacagcggcatactcaccgagactgaacgcgccgaacttgcccgagagatcccccttctcgcacaccagcgggtcggccgcgtagctcgtcgggttgcacgcgtaggtcagcgacttggtcttgcagtccggttcggcgatgtactcggacgcggtgccgcaggcgcgcagcgggtcgtagtggttatccgtcgcagccttggagcactgcttgaacgagtccgacgtcagcgtcgagctctacttggtgtggatgtgccacttgtagctcgtcacggcctccgtgcagttgccgtcgaaggcctggatcgcagattggtccacgctggagaagtcgagctccgccgtgatggtggcggttgtcgagtcttcgcccgcgtacttgacatggatggcgccgtctacgcccgcagtgtccgcagcatcgaacttgtagatgtacgcggggctgtgggcggcggcaccagcgagcgctgcggcgaaagcgaagctaccggcaatgacacggaccatcgtgggaatggtgggaggtggggtgagggcttgcgaggtcggaggctaatccgtgaatgacttcgagttcgagtcgaccgccagaactggtggaagtcgtcgaaggtgttcagggggcacgtgccactggtgagacgttaaacgcgtgccaactcgcacctagattttaatcgcggtttcatgacaatgtatgtatgaagtgagccgttagtacttcatccggactttcatgagttccggccggaaatgatccgcacttaaagttggtgacccaccgcgaatgagtcgagtgagtctcatcgacgccgtgggcttgtagagatatttgaatcgttcgccgatttttgcctccacttctgggttcggatgaattttagtgtacccgggggggggtgatgttatccatagagatcagaatttgttcgtagtgaccaaagaaatgtttttaccgttgtgatctatctgcgtcaactttggctaactcagataggtgtcgagctctgcatgtaatattcccacggcatgtcgttgctcgctgctccgttggctggctgggatacgagctgcgtctgctgatttatgtggtttcttcagacattcgtttcgacagcacaggtcatccggacggtgtggttgccgcacacagcgtgcagcacgatgctccagctcgggcggttctcggacggcaggggcgcgtgcttgtcgatccactttccatacgccttctggtcggcattcagcaccaagttgccgaacttgccggacaggtctcccttctcgcacgagcgcgggtctttcgcgtaattcctcgggttgcaggcgtactccgcagccctggcctgacactgaggagtgtcaatgtgctgcgagtcggggctgcacgcgaagagcgggtcgtagtggttgcccgtagcacgcgccgagcactgcgcgaaggccgccgaccggtgacgggagctccagcgaacgtggatgtgccacttgtactgcgtcacaggctcgacacagcgcgggtcgaacgcctggatcgcgctttggctcacgcgggagaagtcgagggcggcggagacggcagcgaccggtgaattgtcgccagcgtacttgaagaggattgcaccttcgaccccggctgcggtagcagcgtcgaagcggtacacgaatgcaggttgagctgcagcatggccgacaacagcggacacagcgcagtacactgcgaagactacgagttgcagggtcatcttcaagagctgggagagaattgagaagtgagctggaagcatttgcgtcaaatgaaatcgcggtgaaagtctctgatcccttttccagtcgatcgcaaaggaagcactttgatgcatatatttgagagagatacgagaacttgcgtagatctacgtcgatatcacttgactacgcttaggcgccgcagcccggggcgggcacgacgggggactcctgctggacgggggtcgactggtccacctgctcggcctcgtcctccaccgtgcggtgggcgcacgagatgcgcgactcctggccgcacatggcgtgcagcacgatgctccaggactcggtgttctcggacggcagggggaagtgctcgtccgtccactgctcggacacggtcgagtcctcgcccagcttgaaggcaccgaacttgccggacaggtcgcccttctcgcaggccagcgggtcggccgagtagttgcccgggttgcacgcgtagctcgggatcttggccgcgcactcgggctcggcgttgtactcggacacggggccgcaggcgcgcagcgggtcgtagtggaggcccgtggccgccttggcgcactgcttgaacgagtccgaggacagcgtcgagttccacttggtgtggatgtgccacttccagcccgtgaccttgtcgctggtgcactggtcgtcgaaggccatgatgtccggctggttgacgcgcgagaagtcgagcgcggccgtgatggtggcggtggacgagttctcgcccgcgtacttgatgtggatagagccgtccacgccgccggcggttgccgcgtcgaacttgtagacgaacgacggctgggccgaggcaacggccagggtggcggcgagggcagcaatggagcggaccatggttcggtactgaggagctggaggcaaatgtgggaatgaagtgacccggcaccaacaagaggaggaagaggagcaggttcctcctcttgttggtctcgtcttgtcttggcaagagccgctgcaattttccgagggtactgatgggggactggccatgtcgatgggcctcacgccgggcaaggtgcctcgcgccaattgcaggcgagcgggcatgtctctgtggttcgtccggcagatcccgaggcattttacatgcggttgtgctccttcattccctgtttttaatctccgcgcgcggataaacagttaagcgcgtgcatagccccttgagaaacttcaacagatgcaatgcggacaacaagaacgcgtgcactcggcttcaacgcttcaagcccgatctttcgtcagcatcgtggcgaaatacagagacggagtgccggagcttggacaaccacgacgcgaagatgaccactctggatcgaatggcgagagcgtcagcgcactttgagttatcggagacggtcggtgccgaggaaactcattgaaaacactcaaaacgataggttacctgcattatctccgcagtcatggtgaggttgggataacgaactcgttcattgaacacgtacatgtacatgtatttacatgttgcagccagcaatacgacttggcgtgcgggtgtacggactcgcagcaaatttcgccaggccgctcggcctgcaaatcgcggtgcttgaagggtgcaccggtaccgtgcgagttgtcgccggttgttagacctcgagtaagactcggaggctctgaaccattcgtctccacttcggcaatcgcgttcataccgtctcgcgggggaatgagttgtctcctgctgctgatgtggaggtgttgtaagcttggtgggtctagcagaagtggcgttgagtgaaatgtcttgaaaccaggatgcaaacagtagcaactatacatgtagattgtttgaaggtatgcggaacttccagagcattggatctacctacagtacggtatgatcgctggtagtgtaaggataacaacgatttctttgggctgctgacgacaaaacccacttattcatgacattattgtaaacgaatacaagaaggttaagctcttcccaccgatggatctcgctgcctacttggtcttgacactacaaccgccgccaccaccagtagactgcacaggggtttcaccagcgggagtggactgatcgacgccatcagcggccgcttcccccttggtaccaagtgcgcatgagattctaggcgcctccttgccacaaacagcgtggagaacaatgctccacgtgtccgtgttctcggacggcagcgggtagtgctcgtccgtccactcctcggacacggtatacccctccccaagcttgaacgcgccgaacttgcccgagaggtctcccttctcgcacactagcgggtccgacgtgtagttggtcggactgcacgcgtagctcttggacttggccttacactcgggctcggcgatgtactcggacgcagagccacaggcgcgcagtgggtcgtagtggttgtccgtcgccgccttagagcattgcttgtacgagtcggagctttgggtcgagctccacttggtgtggatgtgccacttccagctcgtgacgtcctcggtgcagttgccgtcgaactctttgatcgcagcctggtcgacccccgagaagtcgagagatgccgtaatggtggcggtggacgagtcctcgcccttgtacttgacttggatcgagccatccacgcctccagccgtatcggcgtcgaacttgtagacgaacgacggctgagcggtggcaagagcgacaaacgccgcggatgcgaaggtggcagagcgaagcatcatggagacacgtggacagtggagctccagtctacaaatgaggctctgagcggagtgtgccttaggtacatgccgagctgtctctcttcggagaatcttatggctcatccaaatggcacgggaacgattaatcgctgcgagtgtaacgttaaacacgtgcatagactccaagaaaagcttcaacaaatgcccatcgagtcggaggctttggcccaaagccttcatgttgacggcggggctgctaaaggcgagcacgccgcagaagttcgtagggcttcttcaacgctttgggctccaccgatcttctccaccatcacgggcaaccaagcaagacgcgcgtgtatttgtcttgagcagttatcccccaaaagcgtgctctttgaagttcaaaatttgaacacgtgtaaactcgaatccaatatttttcgcaacaccgtatccacggatcatcacccgaactccgttgtgctgatgtggtacttaagtaagtgttactcggtcttgatgtgtaaaatagtccagcgtcgtctccgattgtcggtatcgatcagaaatgcgacagcacagaatgaggtacacagacaatcctctttggagtgatatcccgaatagggataccctctgattagcactaataaaggctctcccgatgaccaatggtatacaaattcaagtcaaaacatcctctaacctccggatagtacttagtgatacgagattaggctttatctctatccagagaccgttaactatgtgaatgtccatttcgtaaagcatgccgggcaaagttccaccacaacgtgggtcgcttgcgaccacgaatggactcagatcctctgggttcgcgcacatattataaagtttgacatgtttgtaattctggaacgtgtatttttcatgtcagcacgggcgctagactagatttcgcgttgtagctgactgtgcagtactcccagttccatttgaatagtggatagcgtatcgtcacgcttcgtgtcatatagttgtaaatattatagcatccagcacaacaaatactttatctagtgccttaaccacgtatcgagcgcaatacaagctcccaagtacgcattatcactacacactggtaccttgaaacgatattgtaccgtcattgtgacagatttagatagtgatgcctctggattgtgataaaaagtggtcttccgaggctatcactacggaaaggatagacatggctgatgacttgctcggtaggtggcgcattgtcgtggctttcgcgatctggtagctacactccacgacaaaaagatatggacaccaccaaaagtggctgtaacttcgtcaatttttatcgtcttaaggtgcggtttggactagagttgcagaacacgctgataaagatctgcacgttgctaacacgcgcgcttttgcgcttcttcaggtagctcacatacaaatcactggttctgcccaggtgacaaaacttatggacagctaatccccatacaaaatcctatattaaccaaaaacccttacaaatgatacgacttggactttgtatggggcgacaaaggaaccagcctcgcggcgatactcgcgacgttagacaaagatctgatggcattatcgtgtactagaaggtgtgtttagtaacctgtaataaatacatcgaccatcgcacaaaactgagcaagtagtaagcgactgaaatttcgagtggtggctaccatgtattatctgatgatttgcgaggcacgttcagttgcatcctagttagtgccaatttgtagctctgtatgctgctatctcttggatatacgattgtctccattctaaactgttggtcgatgatatatggctcagtactaaggtagagtggagaaatcatgggttcctttgtcgccccatacaaagtccaagtcgtatcatttgtaagggtttttggttaatataggattttgtatggggattagctgtccataagttttgtcacctgggcagaaccagtgatttgtatgtgagctacctgaagaagcgcaaaagcgcgcgtgttagcaacgtgcagatctttatcagcgtgttctgcaactctagtccaaaccgcaccttaagacgataaaaattgacgaagttacagccacttttggtggtgtccatatctttttgtcgtagagtgtaccacaggacgttgtttgatcagtaaagcctcaacttctgtgtcgttggtgagcaatttttgcggctttgttgcacaaagcattacttgcccaagcgcatcgcattggaaatttgttccgaagaagcgtaccgttgtacagatccgactgaaggcatgttggtggggatgtcggtagggaattcgagaatgaatagtctatactgctgacgttagtactttgaagtagtttttcggaactggaggcggcttcgagcgtgaccgacgaatgggtttcgctcttcgctcttcgatggtgatcgaggcctctctcggagtcaatcggatcggcccagctcgacgaggagtgtcggcccacagctgtctcgatgaataggtgcacggctcgggactcgacagcagcgtctcgggggtcagcgggcttttgtcctccttgcaatacgaagtgtaccgctgtctgcgatcgacagacggactgcgcattgccacgtccattgttcggcagctgccgcctcggcgcttggatctggaggacggtcggtagtcgagtgtgtttcgtctaaagccagagcttctggagcgtccgcgtcgttgagagcgcagcatatcgaagaagctcgtgttggcgtccaggatgcagccagtgcacacgggcaccatgatcaggcggcccaacagtccgtcgctgctgctcacgaagacctgctttgaagcgcggcacctcgagcaagcagctcggccacagaccaagcactcgacaacgttggcgttcccaacgcgctcgcacatactgcaggcgttggggtcgttcactggcgagccgtcggaatccacggggctgtcaccccagcggcgctcctgcttcttgcggcacaggtgctcgcgggccattagggtcagccgcttggtctccgagcagtccagcagcctcgtcatgttgaacatggtctccacggcgtagcgcagcgagatgggcttgaccacgaggcccttgatgtcgatgttgcccagcataaacacctccacgatgccctcttccctctgtcggtacaggaaccgcgtcgacatcaacgctgggatggagttgcggctgcgcaggtcggggaactgcggcaagtgcaccgagtgcatgatgtggtacccgagcttctcgcctgtgcgggtgcgcgtgaagccgctgtcctcgaggtagacgcagtgccgccgctttaacagccgcgggtcccccaccgcttgactcacgtagtacttgaagccgaggaagtgaaaggggtcggcgtctgtaggtgactccatggtgtgcaggatgccgcagtccgacgaggccccgtgcaggtacctgatgaccaatgccagctcctcctgggacttggtcaccagcgtgctcactgcgttctccacgaagccgtggcgcactccagtgagcatcatcgtggcgggcgtgatcgctgccggcgtcaccgagaacagcggagactttgccgcgcagcggtggagcgagtcccccagcgactcgctcactcggcccggctgccgttctcggtagatgcttagctcgtcccgcgtagcctgcggcttccagaacttggtgtcgacctcgcccagtcggtcgtacgcgaagtgctcgaacgcgcgcaccgtgtgccccagcaagcgcgcgctgaagtccttgcaggccacgtagtcgcgctggctcacgtccaggtccgggagcagctcccggggcagcgggaagtcgcgatcccgagccatggccttacttaagtacttgcggctgcagcacaagttgtgaaatgcgtcgattgatggaatggctcacccccgccaaatctcgcctgagcggtgccctgacggattgatggcaactcgcgtctgatccgaacagctccagggcgaaatatacagacctgcgacctgccggtcggcagtgccgatcaagcccgcggccccgattcgttgacgttggtgcacgtgttcactgccaaactttcgcgccgacagattcgatgcctgcagtttcattcgagccggggagaggaccgatcgcgacgcaggcaacgggtatcgagcagagcagtcagtcgaccgagtcgctacctgctcacaaacgaacataaattgatgccgtgctgcaaactctcccaaatacatcatttcacattgataaacacacgctgtcactccgcatcggtcgatccatcattgctgcatattcatcggggtccgtatcgcgctgcttccgtctgcctgctctggggctcagccgagtggtctcgttccctggcagcagcgctgaagtagcgcctcaaatcgctggccgagccggagcctccgagcctgctgccgctcgagcccgagatgctgagcgagtcctcgcggtcgtatcggtcggacaggtgcatgggctggaaggccatctcctcgcccgagctgctcttctgctgggctcggtactgctgctcgtagtagctgatgttggccgtcatggtgcagacgctgcacaccggcaccttgacgagcttgcccagcagtccgtcgttgctggtcacgaagatctgcttgttggcccggcagcgcgagcaggccacatgcccgcagaccagacacggcacgagccgcacgccgccgaagccgctcttgcgctcgcgctggcacacggagcagcacgagtcgttgcccagcgacgtctgacgcattggtctccgaccaaggcgctcgtccttcttgcgcttctggaactcgcacgccatctgagtaaggcgcttggtctcggagcagtcgagcatccgcgtcatgccgaaggtcacgtcctccaccaccatcgtggccatgggcttaatgagccacccggagacgtcaatgctgccgagcatgaagatctccaccaagccgtcgctcttctggcggtagatgaagcgcatcgacgtcatggcgcacaccgagttatgacccgacagatccgggaactggggaagcgccaccgactgcatcatgtggtagcccagcacctcccccgtcctcgaccgcgtgagccccgtgtactcgaggtagacgctgtggcgccgcttgatgatccgcgcgtcggtcgccgactccgtcacgaagaacttgaagccgaggaagtggaagggtttgctcggactcgggccctccatcgtatagagcacggcgcagtcagcgacgtccccatgcagaaactttacaaccagcgccaactcgtcttgggtcaaggtcaccagcgtgctcatagcgttctctacgaagccttgtctggttccaaccagcagcagcgtcggcgggatcatcgtcgctgcagtcggggagaagatctcctgcttctctacgagtcggtgcagcgagtcggccagcaccatgcccatggagccgccgtcccgctcgcggtacagcgtgatgtcgttcttggtcgacttggccttccaccgtcggcgctccaccacgcccgactcgtcgtatgcgtagcgctcgaactcgtgcactgtgtgggccagcaacttggtggccaggtccctgcagtcctggtgcacttcgggcgaggccgtgaagtccgggaagtctctgcggggcagagggaagtcgcggcgccccattcttgactaagaggcagcggacaagcgactcgttggtttgtcagataacgttgcacacaagctatctattgtctccaagcaggaaatggtcgagtgaaggcgagatgttcatgatcacgggtgtccgtctaagcgacttgcgcgcccaggcccgcgcttgctcctggcgtggcgggcgatgcttcgctgaggttagctcatctgcagcggacaaaggcgcgctgccccgccagcggacacagcaaaggtacggccagcggcaatgaagcattgcgaggcagacaagtcgtggggccgatggtctccgctgcactcgttgagggctcgcgagggctcggagggagcgcgacggggtcgatgactggcctggcatgcacttggcacccgccacatgcgccttgcgatcgcgcgcgctggccagacgttggtcagcactgagcagcactgtctgcatgcaacatggccaagtggagcgagtgagcgagtggctcggtctgaagacctggattgaaaggcgaggtcgaagtgcgcaatggagacttgtctgcaggtagccggactggctagtgcgcgaccaccgaaacgatccgctcaagacttcaaggagagacttcaagggcgcctatccattcgagtcaacttcgacgtcaagcccgacggcgagctctcatccttcgcggaggaatggtgatcttgaggtgtcgaaggccactgcgttggtggccaccgcagctgagtgtcggtgcttgaccagctaggatggactggctgaaggtcttcaacttgaggtaagccaccgtcgggcctccacctttacagatcccttgaagactgctctacactcttgactgcggccgtgatagcaacgcgcgaggcttcgcttgagcgccgtgggtgtgcatgtactgcactaacgcctatggatatattaacggccatggttttcatactacatacactacactagtggtggagggagatcacttgcgtccggtcacttcctccagtcggctctggattgcatcttgaactgctgctgcctctgctgggcgaagtacatcccgttgacctgcgtcgtgtaggacgtggcctcggccatgtcggtgagctccctgagcctggccatcagcgccatttggtcggacaagtcaccgtcagatacttgcttccgcatcttgccggctttcggttctgctgggatggagccgaccgacagtgagtacccggggttttcaaccgccgacagcttcgatgtgcctgcgtacgaccgggactgcactgcggactgcggcggacgaagtcccaactggttgggcacctcgaactctggtgacgtgcagggaaccgcgatctgcgcggcgtccgggtagattcgtgcaccttggtggacaaagcttcggcccgtgacaggcatctccggcgtctgcggtctccgccgattagacagcttggtccgaggtgggctgcgctgccgccttgacgtcgtctttgcttcctcatacagcacgccgttgaaggcactctcatccaccgacgacttggagctcgcatcactatcactccgatctgtgctgacactgctttggtaccacctctgtgaccgcgcgcggtctgccggcgcctcgtacgtgcccgtgttggcgtgcatgacgcacttggagcacgcctggatcttgcggaagctgcccaggataccgaagctgtcgctcccccagacgcgcttcgtcgagcgacagcgagggcaaacgccctggccgcacaggtggcactccaccagcttgttcggcttgccgcgcccgcacacggtgcacccctcccctgcaacgtacgtggacgcgttcgagtactgcgacgtggagtgatccgctgcgtcactgagcagcacgtcgcggtatcgtcggcggttcctcgccatgtccgtgagccgccgcacctcggccaagtccagcaaccgcgtcacgccgaactgcgcgcaggccgagaagatactggcgataggcttgacgatcatcccggacaagtccatgttgcccagcgtgaatacctcaacgacgcgatcgctcttctgtcggtacagatagcgcgagctctgcagcgctcggatcgagttgtggccgctcaagtcggggaactgcgacagctccacggactgcatgaggtggaagcccagcgtctcgcccgtccgggacttggtcatgccgcagtactcgaggtacagcgagtcgcggtgcttgaccaccacggcgttggtcggactcttcttgacgaaatacttgtagcccaagtagtggtagggcgcgtcgtcgctcgggtgctccatggtgtgcacgatagcgcagtcggccacgtcctggtgcatgtatgtgaccaccaaggccaagtcctgctgacactcggtcaccacggcgctcatggcgttctcgacgcggccgggcccccaccctgtcaacatcaccgtcggcggcgtcagggccgcctcggtgcacgcgaaggtcgggctctgcaggtcgcagtggcgcagagtcttggccagctcgtagctggtcacgccggcgtcgcgctcgcgatacatgttcatgtcgtcgcgcgagtactgcaacttccagcgcttggagtcgaccacgcccttgcggtcgtaggcgaacgcctcgaattcgcgcacggtgtgcgccagcagcgcggccatgagctgcttgccggcctggtgctcctgctgactcactcggagcttgggcaggtgctctctcggaatggggaatcgtctgcccatgttggtcagcagcgaacgcttgcgctggaggcggcaactcaaggaatgaggcgggtcacgttcgaaacttaagcttacaagctgtcaggcgtgtgatgatcggttgcgtgcaagactggcgtgagtgagtcgctcaagcttgaggcgcaggcttgcacaccagtttcccgacaactggtgccggtccgaccgcaggcaggcgtgcaccgtagcattactagagtaggaggcgcctggattgatggcatggagagaccatgcggccgggaccttagcggagaccgtcgtggtgtaggagaccaccttgaagtccggccgcatgccagcagctttcgtgactctagcataacgcgagcggagctaggctagctgagctagcagcgatgtgatcggcgcgctgctgatgcaagttattcgcttgctatgcctctcatgtgtcacgtagggcaggcggctccatgactgcagtctgcagatgctgaccgcgatcttcgagtctgtcctgatccatcaggtctaccaggaactgtagacgctgatcgcccgccggcgctatcgcagactcatctgctgctcgcctcgacgaatctgcttgacggtgcggcgtcgcctgcgcaacacgcacttggatacaacggactcaacgcgcagtcacggatacatgcacactttgtcaagcaccgacgtcgaggacatcctgacatgcaatgttggaggctgaagcagtccggatctcgtcctcaattcgattagaccgctacgtacaagtccaacgctgacgcacgcggccagcatgacacggtgccagcaaacaccgtgctcgtgacctccttggcaccgaccatagagctcgtggcaacgcaggagcgtacatgtagtcgacggtgttgtagttgcaacttcataaattcatttgggcctggagcccgtcataagtatcaattcacactagcctaacgtacatgtttgctacagtaccctcctccttgttctccctcatccacactccattcggtccccactaatagttcttgatcccctgccaacgagggaccacgtcgaatgagcctgctcagtcagacccacgaggtcacggcgttgctgcgacgaacctgggagcggctggcctccacctctatcttgagctcctcgcgccagtgctgctcgcagtagatgccgttcaggtgcgcggtcgcggacgtgtcctccgcaatcttgctcagctcgaacagtcgagtcattatggcgcgctcggccggcgacatgcccgacgggagctgcgggtcggcacttgctcgagtcttgggcggggcaccgtaaatgggggcgtcgccttgagcggggatggagacgcgcgtgcgggcgcgaggcctggccgggagttccgcttggatgtggcggaagcctctgtcggaatgggacttgtttgtgggggcgggcttcgtccacgccggcggactccatcggtcgttgaggcgaggggcgacaatgtccttgtcctcttcttgccggtccagcttcgaagtcatcggcacgctggacgagtattcacccgggaggggctccttcttcgacggtgcccgcgaaggataggtctcacgtcgcatcgaaggatggcgctgggtctcggcaggcttcgaccacgtcctgggctttggtttgggcttcctgaagtcgaagttgagcttgtcatccggagtgcgcagcacgcgctcgtgcggggacgcaaggccgcccgtgttggcgcggcgcacgcaggctctgcatgccggtaccttgacgaaatctccgaggatgcccatgtcgtcccccacgaacacgcgcttggtgacggcgcacttcttgcacgtggtcttgccgcacagctgacaccgcggcatcttgtgcttggtgtctctgcggttgcaccccgtgcaggcagactctccttcgagtacggccatgctggccccgaagtttcgctggttgcgtgccatctgagagagccgacgcacttccgcgagctccaaaagtcgagtcacgccgaagaatacatcaaccgtgaacatgttggccagcggcctgaagatgcggccggagatatccatgtttccgagcatgaagacctcgaccacgtgcgtgctcttctgtcggtagatgtagcgtgtcgactgcacggcgcggatcgagttgtagtcgctcaggtcggggaactgcggcagctcgaccgagtgcatgatgtggaagcccagctgctcgcccctgctggagcgcgtgatgccgctgaactcgaggtagacgctgtgccggtgcttgaacagcaggccctcggtcggcgacttgcgcacgaagaacttgtagcccaaatagtggtagggctccgcctgcgtgggcggctcgagtgtcttgaggatggcgcagtcggccacgtcctggtgcttgaacttgacggccagcgccaagtcgtgctggctttccgtgaccagcgcgctcatggcgtactcgacgcgtccctggccgtaacctgtgagcagcatcgtgggggacgccagcgtctcgatggtggacgagaacatgggcaggtcgagtctgcagtggcgcagcgagttgaagacgctgttgcccgtgacgccggtctggcgctcgcggtacagctcgatgtcgtcgcggtacgtgtgcggcttccagcgccgcgcgtccacgatgccgctgttgtggtaggaatggaactcgaactcgcgcagggtgtgcgccaggagctgctgcatgacctgcctgctggcctcgtgctccagctcgctcacctcgagcggaggcagggactggatggggaaccgctggctcatgctgtcgagctgcagcgcgagagctggcggacggcgaaaacgcgatcactgtggctgcggcgtgcgagtcgagaagtgagcccgtcctgtgcttgagcacgcagcaccgaaagagggcaggatcagatgcaggtcggcgaggcgtgcccccattccaagagcaagccaacgggaggatcggtggtttgagcgcgcggggtggcacgcggcgcggttcgctttgcatggacaaggtgcgaccagtgtatccgagggcgggacattccggatgatagcttcgggatggggaaactgcgccaaccaaggcaggagctcggcccatttcgagcagaacccctggatccgagtgtatcctgcgggtctgtcccaagcctgcagtctggtcgtgcaataacagcacgccgagcagagaggggcgacgtgatcacagctttccacgagcatgctcgagctcgcgactgaattccatcctgcacttgcctgcaagcgagcgagcgagcgccttcgatccgttggactgtccaaggtgcagccaactccctcgcctccttcacgcgcagacagaaggcacgcgatatgaacgcgcactcgagggcctccccgacggcggagcagccagccagccgattccggttgacatgagcattctgcggaggtagagtaaagcggaatggctgggcgggcggcagtttgctggggtccatcatggacatggactccatgtcaacgagatgtcaagccggacgtgatgtggaccatcgcgcagactcaacgtgagaggccgaccacacgtgctggtattaagcagcactttgcggtggctgttacatgacctcccatttgatgctggtggactcttgcaggctgccctgttaatcagacgaaggtgtactcgtgccccgtgcaacttgtgtcaggactgtcattcgcgttgcagaatgccacactgacactgtttaccgccgatcagactgaaggatactcgcggcagagtatcttgtggacgtcatggcttcaatgatggcttgggtgctcgcgctagcgtcgaaatggagctcttgaccaacagcacggaccagattcacgatttgaacgcgaagaataatattatccgaagccgctagactaccgaggttcctggcgcttctccgccgacattcgccggcctcgggacgacacgtacgcgctggtctgctccgcgacatcgttcagctcttgcaggcgcgcgtacatcggggaagatccagtggagtgtgaacgcgtcgaccggttgctgcttcccactgagcccgcggacgttcgaggatgtcggccttgcggtgacgagcttgaggttggctgcactggcggtttgcccgggctgttggcccgggcgacgacctgcttcggcgacgcagacgagtccgacgtgacattggactgcacttgtcggggctgcatgggtgacaccgctgcagacacagcatccgtgttgatgctccgtcgaactcgatgcgagcgctcccggctactagagcggcagttcccgctgtatgcacgcgttacttgagctggactgccgctcttggtggggctagcgcgtgaccctggagtcgatgggagtgcggacgagtacgagccaacagaggagcccgaggaatacgacgacgccttgggacgagaagcatcgatctccatgctggcgactgcggctgacactgaggccaccgcagccgacacgcttcggtcggaccgggcgctgagggggtctgtattgtgctggggacttctgccacgacgccggcccgaacttccgcttgacgcggagtttgagcggtgctggagacgtgaactttgagcgggagctagcggcgacgtcgaggcttgtgacgctggaggtggaggctggtgaagcgtctcgttggcctcaatgatgcagctcatgcaaacggacaccttctcgaacttgcccaagatgccgtcggcattcggcacgtagatccgcttgatgtctcgacacgtcgagcacgcgaacagcccgcagcactcgcacttcaccaggagcttggagctggagctcagcaacgagctcttcttgtgggttttgccgcagagctggcacccgtccgcgtcgggatggcgagagcgcaccagcacggacggccgacgctcctgcaccatttgggtgagcttcttggcctccgcgcagtccgtgagctgcacgagcgcgaacagcgtgatctgggccagcttgtccgcgatgggcttgatcaccattccggagatgtcgatgttgccgagcataaagacctcgaccacctcgtggctgcgctgtcgatacaagtaacgcacagactgcaaggcgcggatggagttgtagttggccagatccgggaacattggcagattcaccgagtgcagcatcacaaagcccagcacctctccttgccgcgtcgtgcacgtgccgctgtactcgatatactgcgagtcgcggtgcttgacgaggcccggggcgcccggcgacttgcgcacgaaatacttgtagccgagatagtggtaaggccgctccgctgtgggtgactccatcgtctgcagcacggcgcagtcggcaacgtcgtcgtgcatgaagttgaccagcaacgaaagatcattctgcgtctgtgagatggccgcgctcatggcgttggccacgctgccgggacagcagccggtcatcatcatggtaggcgcggccaaggcggccaccgagtcgctgttgggcagcattgcatcgggcccgagctccgcggccaggccggcgctggtggcaccagccacgcgctccctgtagagcttgaggtcgtcctgcgagtcgatgtgcttccaacgcgctgcgtccacgacgccctgcgcgtcgtacgcgaagttttcgaaggccagcaacgtgtgccgcaacatcctggtcatcatttgcttggccagcctgtgctcttccgcggacaccttgaccttgggcagcagcagccgcgacaaggggaagctcggcgccatggctgcttggaatctgcacgctcccttggtcctgcacgatcaagagtggcccggcctgccttggagtcacacgaacaagagagacctacagatagaaagagcggcacagagacgagatggccgcggtgttccctcgaagaggcagtcgacgtcaaaggaggtcctgccgcagctggaagcgcccgcagacttgtagtggttgcagtggcggcgattgggacagtcgcgcgcgctgaatgaatgcccgacagggaggaaggagtgtccgagcgatcgggccgcagatggttgtcgagagcgtcgaatggtgggatccatggccctttatgtgtgcttgcgcaggattcactcgccttctctgttcctctcctcatggcttgccgcagcatggggatccccgggtcttcacgcgtcgctcgtaatcgcgtcgttactcctgggtgagccgtaaagctgggcaagctccaccaaatgacacagataatacatgatgtaagcaagcattgagttcatcgtggaagcattggcaaagacgtgacttcacagacccccggttctgacagctctgtgagggtacagtaccatcataggtcgcttaggccgcaagtggttacaaatttcaagtgctttcggtggctaggttttggcacaatttgacataggctggtactattgtagttgcattgccgttttcccgactttaccaaactcacattggacaccttcctccacagaggaggagcctccatcgggccaagctggttcccaggaaggggaatgtctttcccgttgaagaccatccattccgacccccccccccccgcacgcgtgagcccagccccaccgagagtcgcgcatcaacttgaccatcacgctgctgacgctcttgaagttgtcctcgacgacttcaacgcggtcaagttggccacgttgcactgcttcgttccgggctgcaccgccggcaaagcgctcgaggtttcgacgtaaaagaacaagcaaaagctccgacgagttttgcggtaaagtggccatgtatattttgcgtcttagtcacccagctaagtagatttcatagatatgccctaagctacgccttccttctcgcccgcagctgctgcgatagacagacgccgttctgctgcgtcgtgttgtacgtggactcggccacgcggttgagctccgccatgcgagcgagcaggtcagtcggctgtgacgacggggctgtaccatagttgtagcgggaggagttcaaggtcgaaccggtagacgccacacgccgcagcgcgtagtcccgatgggagcgcgacacgaggaagagctgctggtgtctgctctggggcgcctcggacagctgcaacggtatccgatgctgctcacagagagtcaactgctgctcgttgcctctatctaagccgcgcgatgacttgacagcattagcttgccgtcgttgctgttggagttggagcgctgcctgctgatcgttgatagtgtacaccagctgacctccgtgagctcgagcatccatgcccataggagacgccggcacgccgaggccttcccggtagcttctggaactgaccgtgcttgcagtgctggccacgctttcgtgcctcctactgccacgatgtgcttgcggtgccggcgagcactcctcggaagatgccgacgggcagctcgagtcggagcgagagcgtggccctgaactacccgaagacgaagccccacgacgccgtcgatcccgggagccttcgcgatcaagctgcatgtgctcggacatgacgatgagcccatgaggctcttccggctgtgagcgcggcttgttggcggccagcacgcagcacgacaccttcctgaacttgccgaggatcccgttcgcgtccgcctcaaacaccttcttgtccgtgtggcatcgcgagcaaattatctgcgcgcatagctcacacgccgccagggacgcgccgccaaacagcttcttcttctgccggcacatgctgcactccaacgtcgatgcgcgtctggactgctgcttgcggtgctcctgcctgtcattgcgagcctgctgcgctctccacatctgtgtgagccgcctcgcctccgcgcatgcgactaatgttgcgagaccgaacagcgcgtcgctcgccaccagcttgccggagatgtccaagttgccctgcatgaaaacctccacgacgtcctcgctgtgctgtcgatacaggtagcgcgtggactgcaacatgcgcgtcgagttccgagctgatagcggcgggaactcagcgagctccagcgagtgcatgaggtggaaccccagacgctcgccccgcgtcgtctgcgtatagcctgagaactcgagatacactgcgtcttggtgcttcatacctgaaccggaagccttgcggacgcaatacttgatgccaagaaagtggaacgggtcggtctccgttggcgcctcgatggtgtgcagcacggcgcagtcgaccacgtcctcgtggtgcacgaagctcagctcgagcgccaggtcttgctgggacgtgctgcaaactgcgtccatgacgttctccactttgctgcgcgtggagcctgtcaccaacacgcccggaggtgtgagcggtgcgacggtggagccccgaggcagcacgtccgacttgtccagagcaaaggccagcgctgcgctcatggcgccggcttcgcgttcgcggaagactcgcacgtcgtccctcgaccccaaagccttccacctcgaggtgtccacgaccccgccattagcctgtgcgtgctggtcgaactcgcgtacggtgtgctgcagcatccgcgtgcgtggccatgcgtttgagcgcgcgttgctcgagcctcgagagcgagatcgtccgcagctggacgcgcgcaatggggaagcccgcgctcgtgctcattgcaaccgagtgagtgtccacttgctggtgcgttggcgactggggagaggctggccgctgccaacggagaccaggcgtatctgtgcgacctcgagggtgggctcgcggcgggaagtgacgcatggcaggcgaaggcagcgcgactaaattcactgcggtagaaaggcgtcgggcgtagtattgtctcagggtgatcttgtcatcgttgaagtgggccgctgcgctgtgaggagcagtgccctgaccagacatcgtctgatgccgtggcaagcagaagcagcttaccacgtcgttgcattcgaggcggcggaagcaagacgtgagagagtgaacgcaaatgtatcgacaagtcatggtggtctctaggagtagagactctctactccgagttaatcgacaagcagcttcaacgtcaagtatcctaccatcatgctacggttgttgaccagtcaaaggcgctcaacgagctggttacgccgtacgtggctgtggcctcgctcgtagaggccatacgccacgctaggcactaggaacgccaaaacgatgagggtcgacgtcaagctgcggaaggtgtcgaagacgatgtagcagagcacaaccgtaggcaggccagccagggccgcaagcacccgcacgccaccagggacgcgaacgggccgagggatgtacggcagcatgttgcgcagccgaacagcggccaggatgatcaggagctgtacagcccccgcaaacgcgttggccatgggcaagaggtgggcgaagtccacgcccagcagcgccatcgtgaacaatgcggtgacgccgatggacacgaatggcgcgtcgaacctcgagctgcgccgcgcgaagcagtgaggcagcagctgcacgtcgcccatgccggagagctggaaggacttgcagaagatgcccgacacgaacaggccagcgaccgagcagcacgatgaaaacacgaagaacgccttgaggacggggccgccgatcgactcggccagggccgggtacgaggcgtgcgtgaagtacgaccagttggggtcgtccaccaggatggcggcaggcatcggcaccaaatacgtcaacagcgtcagcacgacggtaaacgcgatggcccgcgggtacgcgcgcgccgggttggacacctcgccgccgaagaccgatgccatgttgatcccgtcgaaggcccagaagagcgtgttgagtagcagcgcccagtcgatttccaccgctccgacctgctcgtcgtcgccgaggtcgtgatggatgacgttggcctcatgtcgagcctcgaagaaatccccaaagtcgcgcgcgcgcatgtagccccaaacggtgaacaccatcactggcagcagcacacagaccaacaggatcacgcaggtgcgcgacacgactcgagtcccgacgaggcagggcagcgtgaagaagatggcgagcgccagtttgacggcgtaggaggcgacgctcgaggagatggagacgtcgtagtagtcgctcagaatctccagcaagaagcccggtagcaacgccgtgttgaagatgccggagatccacgaccagtagcccacttggaagccccagaacggaccgaaggcgttgaaaacccacacggtgaagcctccgtcttcggggaacgcgcaacacagctccgcgacgatgaaagcgtacggccccgtcacgagcagcgggtagaggagcatggctggaagaccgatcactggcccagtggacgacacaatgggctcagagcctagtggacctccgcagccgaagaaatacgtgacggcaacgatggaaagtgtccccatgacacggtggtgaacaggagctcccgttgacttccggtacgagccatcagcatccagcacagcggtgtccaggcactcgatatcactgctaaaaaggatgccacatgaacggtgagcaagaaagttttgaagcatcggaaggagatccagagacttacacgaatgcggcggccatcgccatatttcggtgaaggcttcgcttcgagcgggcagatttggttgtggaagcgactaaaagcaaacaggactcgagctggacactttccatgaaagtgaaaacgcaggcgtccggctttcatcgcgcttggctttccattaatcgtgcgaagtcccagctgtgagcatttcacgctacaagaatcatgagcgtgcgccaaaactgcggctcgagaaacatgaaaggtggaagaggtccaatcaatgttccatgcagtagaccttccgatttcgcttctctacgatcctagctagaacctagataaaccccgagcacaccaattcacgtgagtgatcccggtattgtccgtagagtccgtaggccagtccgggtaccaggaacgccaagatgatcgccgccgacgtgaggtcggagaaggcatcgaagacgatatagcagagcatgaccgtcgggaggacggcgagggctgcgaggacacttttaccaccggggactttcgtgggccgagggatatacggcagtagcttgcgcagtcgaatcgccgtgagcatgatcatcaattgcaccgtggtcatcggcagcaggtcgtcgaagtccacacccagcagcgcgatagtgaacacggcagtgactcccacagacacgaatggagcgtcgaactgcgtgcttcgccacgcaaagcaagctggaagaagctgcgcctcacccatgcctgctagctggaaggactcgcagaagatgcccgatatgaacaaccccgctacagtacaacacgaagagaaggcgaagagcgccttgagcacaggaccaccgatcgactcggcgatctgagggtacgagtcgcgcgtgaagtaggtccagttggggtcgtccacgatgatggccgctggcatgggcaccaagtacgtcagcaccgtcagcaccacagtcaagaccactgagcgcgagtagatcccagcggggttcgccacttcaccgccgaagaccgacgcgatgttgatgccgtcgtacttccagaacagcgtgttgagcagcaacgcccagtcgatcgccttctcgccgacttggatgttgtcgcctgcgtgcagttcaatgccttcatgccgtacttcagtcagatctacgtagtcgcgtgcgcgagtgtaggcccaaaccgtgaagaccaacacgggggccaacacgcagacgagcagggtcacgcagctacgcgacgccaccttggtgcccagaacactcggaagagtgaacaggagagcgagggctgtcttcacagcataacacgcgacgtcggactcgatggagacgccgtacgagtcgctcaggatttgcagcaagtagcccggtaggagcgccgtgttgaagacgccggccgtccacgaccagtagccgacttggaagccccagaaccgcccgaaggcgttgagcacccagatagcaaacccgccgccctctggaaaggcacagcacagttccaccacgatgaaggcatacggccccgtcacaagcagcgggtaaagtaccatggccggaagaccgatggctggcccggtcgacgagatgatcggctccgatcccagaggcccaccgcatccgaagaagtaagtcacggctgcgatggagatcgtgcccatgacacgatggtgcattggacggcgattcatttggctcgacttccgatatggagcttcgaagtacggccggatccattgcttcaaaatcgctgcgaaaatgagaaagacaaaggtggttgatctcagtggtggtcttgacaatgctaaaggcgacggagcttacgttattgagctgggagacatgagctgagctgcgttgcgttgccctgagcttgagtgttgtggtgaggtggtgaattcaactgtgagtcgggctgactgagctagcttgagacgaaccacgctcgagcgcatatcaagacgatggcgccaagtatatccgccgaaagtgtccgtgagtcattccagatgaccgatagtccggctaacgctcaaaatttgaatggcttgtcagaattagtatggaggcaatggtaaggttcgcgcagagaaatagtgcaatggcgccacgctccacctgcgtgggtgatagtcgaacgctcgtgcctacgaagcactccagtgttgttctttcaacgaagaaaggttgcgatggcggttcaagcgcgtgatgccggcaaagtcttaatccaacctaggcacgtttccccgttatccacatcgagacgcgactatcccgggatgaccacgcaaatcggagcagcacatactcacatgtgaatgtggttgacggaggggagctcaaagatgtcgtgagtgcaccatgtcggcgaaagatagataatcgaattcatttacatacagcacgccacttcacttcacctagctagctgcgctgcggagtttccataaaatgttcaccaatgcgcagactttcaccgattcacgaagcgcttatacacgacttcctcccgctggatctcctccgtcgagagattcctagcagccaggaagcagacgaggcagaagttgtaagcatgagctgccatccccgacttgctgtggctcgaccgcaccacgagctccttgttcacactgcaacgcttgcacacgcactgcaccatcaagaatcaacatcagtaacacaaaacgacaacaatttcaataggggctcgtacctcgtggcacacggtgcactgcacactctgggtcgagaagagtttgccgatggacttgtggcaatacgcgcaagtattccggtcttcactctcgatcgctgtctgttccgtcgtggctgaggacgatgatgaagacgaagacttggacatgtcaaagatgttggtcgattccttctcggctgcagttttgtgcacgtaccaccgcaacttcttgccttgagcgcattcgatcggagcccccatgcccagaatactattcgcgatctcctggagtgcgaagaacgtgagcattgtgcctccagggtcgatcactgcgtgcgcgaaggcctcgacgatttggtcgctttgctgtcggaagatgacgcagaaggacacgctggcgcgaacgatgcctagggtcttcagctctggcaggcccgcgtgcgacaccgactgggcgatgcagtagccaatgcgttcgccgcgcgagctggtcgcgaatcccgtgcgtatcaacacaacgtagtcccgctgcttcacgatcgcgcctaggcctggagctgagtagaggagccaggcaacgcccaggaagtcgaacgggtcggcctcggttgggctctcgagcgcggcgagcattacgaagtcgtccaggccgtccttgccgtagaggctgcgtctctgaagagaagccgtgtcgtgcacgaagatgccatacatcacgtcgtccagagttccctgcactgtgccagtacagataacaacggggattttggtggccacggacagcgaagacgcaggcccgatgagcagcgcgtcgtcgtccacctccaatgggtcgggcgacgatgttgaggacaccgacgtcgcgcctggcgccaccgaagaggaggacgcactgggattgaagctgctgtcgatgctgccagagcgttgacgaaagaccttcatggctcctttggttcgaacgtgcttccaccgccgcgagtccagcgactgcctcctctcatacagaaagtcttcgtagagcgcgcgcgtctcgatgaagctctcgtcggcgacactgcggtactcgcgcgcgtcgtcgtcggtgaatgtcacctccgggagcattgcggagcccatgaaggtgcgcgacggcgcttctgatccgaacgcggtggccatggcgtggcccgctgtccgccgccacttgccagcgagttggttgttcgcttctgccgctttctttcgcgcgcgtgggcacttgacgctgtgcaggagaagccgggctgcggcctggcttgccagcgggagaatgaagccctcgccgagggcgtgtctccgacggagactctccgttgacaggatggtccgctctaccggtagggaagaaggccaagtccctctgcaacgtcttgtcgcgcggaggagcaggaggatgtggcgcctgacctgcacaactccacaccgaggctatctccacttcaagtgaacacttgccctcgaacacgccaaagtcgcagcgaacacctagattcgagattcggaagacaccacgctcgccgcgttgtgccgcagcagcaagaaccaccttagagacgccagttaaacgaagaaactctggacgcgtgttgagacttcaagcaggtttagagttccgtccgcgggccgcatctccgctgccgaagaacggcgcgtgctactcgacttcacgggaacagatacgtcgccccgacgccgctgacggccgtcgtcgcgagcaccgacaccacgttcacttgctcgttgctcaggacgttcaggccgcagacgcgctcggcgtgcggggtcgattcgtcgcagattttgcgcgtcgagcggtcgaagtacgtgacctgcaccgtggcgccgagcagcgagtccagcagcgagccgaagaggcccgtggccgcgcccagcgtgactacctggggctgcgccgtgccggacgccagactggccgcgtagtacagcgcgccgatgaaggccccgcccagagctgacatggccagacccagcaacgacacggcgccgttcgtgccgggcggcacgcgccgcagcgtcgtgatgagcctcggctcgctcttgcttagcacgccgagctcggacgcccaggtgtccgcggcgcagcaggcgtagtggccgatgaagctggccagcagatagctgcgcgcgggcgcggccttgaagtcgagggctgcgtcctcgtcgccgaactggagcacggtgtacacggcgatgaacgtggccagaaggctgcaggccagcacctgacgggccgagcgctggccgccaggcttgtagttggcatccagctgcttcttgacgctcgcgcgcaccttggtgagcttgctgccggagaagtagaagcccaggagcagcaggcctgcgcacactcatttgagttagatatgagaggatagatactcaaaacgatgggggtattgttaccgtagcgatagcccgaggcgagcgtgaagaagcccacgaagcaggcggccgccgcgcccgacacgtccagcgactgcttcttgaggccgcggcggccgaggcccccggccagcagcgccgccactagcacgcgcgacaaaggaacgagcatcttcgggtccgctggtccggccgttggcgccgtgtggatttgcgagtgtatagaaacttcaagtgctttcggcagctatccgcggatatgctggcccaggcatgaacgcggaacgacacgatggcgacgatggccataccctacagcggagagctccatgcctttgccggcgcgcaggacttgaaccttgaacaatggggacaaggtccgactcagcgagtacaggcactctatggcatgatggagctcgagggccgatggccacttcaacgcggctgccagcccttatgcgctgcaagcttggccgcggcacttccgtccaaggcgcgcgcgctgatggcacaactgcagccgcccaagtttgcgccaagtatcgttgggacgttgttggaggcccttgacgtcactctttgattgccagcatgatggtccgtccccccatgcgcaaaatgagccaaagtcttgggccgagccgtctcggttggagaactcgcggggcttcgcagcacggccgaggtgtcgtcggtaagaatgcaaacgacagctatcggatcccgttgcaagggcaccgcagcgcatctcggtccaagtgcaccgctcttcaaattgacgtggccaagtcggagggagtggcacgacgagggacctcggggttgaggcgagcattcgtcgatttgccgtgtcaacgagagagacgccctcttctggcctgcaacgcttgacgagcatgagctctcgcatcaacgtctcgtccgacacgctgccgcgcatgcgcttcaccaaggaggatgtgcagcactaccgcgagatctcggacgcgtgtctggccgaggtgctggacaagtacgaggagtatctgtaccggggcgaccgccacattgacgagcgccggtggaagaaggtcaagtcgcgcgagggcgtcgtcgtctaccgggagcgctcgacctccgacgccgacctcagcaccaagagcggccacgatttcagcagctccagcagcagcaactccagcggcccggcgtaccacgcgcgccacgacccgagcacagcagttgagaccgtgagcaacgcgccgctgtcgggccccggcgcagcgctggcggccggcaccaaaatccctgtcatgatctgcacggccacgattcccggcacgctcgaggacgccatgtacgggtcgtacgtggacgacgcggcctcgttccgccgacgcagcgcgtacgagcaggacctggccgacgacatcggcatgctggccacctttgatcggccgtcgcagaaggacccgttccagttcatggggctcacatggatcctgcgtagcttccccggactcggagcggtggtcaagccgcgcgacttcctgctgctgcaacgcatcgggctctcgaggacgtcgcggggcgatctgctcggcttcacgatcacgcagtcggtgccccaccgcgacctgcccgagctgtcccagtacgagatcatccgcggcaagatgtccatgtgcacgatctacaggcaaatgggagatctggtcgatgtcttcgtgcagattgtgatgcagcccgggggcaacgcgttgaactacttcatgatccaggaaacagcaacctcaatcatgtccgtcggcaaacccatggacgtcgctcagaacaagaagctcttctggctggtgaggaagaacgcggttgaagcgtcaatggcaatgccggggtcgccaggtactcgatcgtcctccgcatcgtcgtcctcttcaatgcatcgcctgcagcggcacgagtctgaccactgcgcggcgtgcaaaaaatcgctcaccaggatcttctccactgccggtagcttctgtcagatctgccaaaaggttcttcatctttatcgtgattgtgtgtggtggtggcaaacactaacctgcttgttgcgtggtttgacgtggaaacagcgcgtgtgctcgaagtgcagcgtgacgaagaagctcgtgatcgatgcgtcggagaagaccgtggtgattcggccctttaacttctgcctcgggtgcacgctcactgcacggagctactcgccgctgcaagttcacgcggaagaactagcgcaacgcacccgcaggtagacgttgttgagtgatacgtgttggaagcaggtagttattgtcatgatacatcgttgttgttgttgttgattccatctcgctgagagtgcgatctacttcgagcgcatttttcaccctgagcccccagccgcttataatctactactatctcgccctggaaggcaccttagctgtaggagagctcgagtcaaggtttaagcagcgctgtacccggacctgctggcaactgggtcttcaacgtacagcatgacgcgaggagtggccgaggatgaccgacgcacgccgctcgggatgtaagccgcgctgctgtaggccttctgacgaggctggcagtacggggatgccgcgtagggagatgccgcggcgtagtttgaaaactggtgggatccaaccgaagcctgcgacgatcgcacgctgtacggacgtccagtctgcgttgatcgccggcgcattgtcgacggcctagtgcttgggcgctccatggtgctgcggggagtcatgagtccgaagctcgtctgctctagaatctcctccaccacgatctgcgaggcgttgcgctggttggcgcgcagcacacacggcaggcagaacttgagcgccttctggcagatgtcgctcatgttggcgccgccgctcccactgccgctgcggctgcgacttcgctcagtcgatgcttgggattcctccggctgtacgaagtcacgaatgcccatgcttccccccagattcacgccggtgttagtgaccgcgtcgttgccatcactgcgcgagaaccgcagcttcttgacgacgctgcagcgcgagcagaccgttttcgcgcaaatggtgcacggcgttccgcttcggatgagcacgctaccgactcgacggtcgcacagcgagcagttggtcgacaaggctgcgttccgtgctatgatgtcgatgtcttcgtcgtaggtctcctcgatcccgcacatggcttcatccccgtaagtagtcttgtggagctgggtcgaggctttccgcttgcgtccagcttgctgcgccgcaaaggcgatcttcttgaggtgggcgcagtccacgaccgagaaggtcatgtgcagtaagagctcagctcctgcgttcacggccatgaactccatcatggcgccctgagggtcgtagtatcccctcgtgaacacgttgagcgtgccggtgagacccgtcgacccctccgacggtggctgctggtggaacagctgcacgacggacgcccgtgcacgaaccaccgaggaggaaatgctcgtcgacgccaactgggccagcgccttgacgctcaccgagtgcataactcggtatccgacacggtctccgttggccatcttggtgacgcccgtggcttccaggtacagcaggtcccgcttcttggacatggcgtcgtggcgcacggcccacttgagtccaaggaagcggaagggctgctcgatgctcgggctttcgatcgtggccagcacctcggcgtccacgagcgcgtcctcagcgtacgcgctgttcaccttcatggtccgtgtgttggcgctgaccaggccgtacatggcgtcgttcacctggccggccagaactccggccaccatgagcagcggcagctccgtctcgttggccggacactggcccggctgcgggccggcggccgccgcgatggccgcttgcttggccgcagccagcttgcgctgcttaaaggcgcagagctggtccttcctcttgatgagcttccactgctgcgggtccacgggcgacaggccgctgcggcccgcctggtagtgggcctcgtaggccttgaggccgtcgaccagcagcagttccgccaggcgggagcacacgagcgcctcgtcctccgacagggcgacggcgcggcgctccagggccgtgaaggccgagagcgtctcgagctcgaccatgttgctgccggccaccgtgggcgcgcggccgcgagtcgcgcgtgacccgaggcggggccgcgggaagcggcggtggcgctgctcctccatgctgctgccaaggtgcttcgcgactgcggctcggaatgcgatctgagcgagagaccacacgcacgtcagtcacaacgcaatccagcgaccgcctcgaggatcagagtgcaacgtccagcattgcgctcgggtctatggcccggtttcagttcagtcctcagaattcgtatccgtcttaggtatccgaaaatccacactatacgaatcacaatttttgaagacctgtaaatgatgatttagtgtaaaaatgtgtacgacgttatattgttattatgtccctctactaatcattgccccgtggaagccgaattgcaaatatgtatcgcctgcaacaggatgtgggattcctaagaattatgagtagcttcgcgatttgtaggcatagtgaagacaagtcgacgcgcagcaggtgtcgaagcggaactcgaagtgctccacgatggcgatcccggggctccagctcgtcgtacctacgagcccgctctctcctcggtataaaatggcagcaatctgtcacgggcttgacacgatgtgcttcgccttcgttgacggccatccttcacgaaaaacagtcggtccatgttgatccccgagctctgcgctccatacactgtacacagcgtgagttgttcgattgtccgcgtcctggctgcgccgtgcttttggtccgacaccgtgtctttgactgtgcaatttgaggcgcagctcgaagctgcctccgagccccttcactttggccatgcatcgtcgagcgctacaagcacctgatccgcgtatgcaacgccgaagtaaggggtggatgccccagcggggccattcgcaacgccatgcggtcagcgttgcggggcgccagagctcaacatcgcgtgacccatttgcacctacggccaaccggacttcgtatcttctgcattgtgggcgtcaggcacttggcgccggagcaagccggccgcgttgcgaaggcgtctggcctcagcgcgcagagctgcagcagcgaggccccggtccaaccagtctgggtaacggctcaactgccaggcgcctaggaccaggaacatgaccatgataatctcggtgagtccgcatgtatcaccgagcgagcgagtgatggcggtcagggtggcgatcaggaaacatggcttccccacttgctccatcgacgttgagcagcgaaacgtagccatacaagccaatgttacacgatgcagcagcaagtgctaataggtcgtgaaagcatgcagcccagataaagtcgcaactggaagtgctaacgcagtgaacgttctggggcaaaacgtactgccccctatacatgtacaagtgtcgtcacgatggctgttgtgcagttcatcaacttctagttctgggggcgattactgcgggcaacgcgctagcgagaagtccggcaccccgagttctcggcgcgtgccgtcacggcttgaatcagcaccgacttttcttcccagccggcctcgtgtgttggtgttcttacagcgacagcacagctctcgatgcgtagtcccgatgatgccgccctgattgctataaaaagctggtttgagtaggctactcctttgccgcctacgatgcgtgacagtctcctcatcaaccaagctgagtcaccggcgagtgcacgggtgcacgactggcattatgagcgccgcaaacgtttcaaaaaagtttcaacagctctgtccaaccagtgtacccattttcatggaacatggctacaatctgattacgcggatccttgtgtacagtacaccaccatcgggccgcagcactaccgggccggcgaaggaagcggcgtctcgtctcgatcccgcccgcagccatggcgaaggccatcatctcgtcggtcctggaggcgcagctgggcaagtacgtggccggcctgcgcagcgactcgctggtcgtggggctctggagcggcgagctggagctgcgcgacctggcgctcaagccgcacgcgctggccgagctgcagctgcccgtggccgtggccagcggcagcgtaggccgcgtgctggtgcgcgtgccctggaaccagctgggcagcgctagcgtgaccatcacgctcgagggcgtgtcggcgctcgtcgtgcccaacacggagcggcccagcgcggccgagctgctgcaggccaagaagaaccagctggagcggcgcgagctgctgcgtcagcaccgccgcttcgccgcgcgcgtcggcccgggccaggagctgcacgagcagcagaagcccgaggaggacgagggcaccttcgtctcgagactcacggcgcgcatcgtggccaacctgcaggtgacgctgcgggacgtgcacctgcgctacgaggacgccgtggccaacccggaggcgccgttcgcctgcggcctgatgctcgagcggttccgctacgttacgacggacgaggagggacgcgaggccttcgtggaccaggccacggtgcacagcgccttcacgtacaagaagatcgagctctcgcagttcggcatgtactgggaccgtctggacgttaacgacaaggccgcgaggctcgagacaagagaagatgtgcctcaggccatgcgggccatggtgcaggagctaagtggccagcaagaagacacccgggtcgacagcagcaggaggtggctgctgcgcccgtgctcgctgggcgtgcagctcaccaagaacgaaagcacggactattcggcggtggccaagtacacggtggaagcggagatgggcgcgctgcaggccagcttgacgcgcgagcagtacgaggacgtgctgtttctgcagcgagctttcttggggcggagagcggtggaggcccattttgcgctggcccggggccgcccgctgcacgcaccgggcgcgcgccctcgtgagtggtgggactacgctacgcgcctggtgctggagcagcgcagggcaaagcttcgaagacaagcggccaatgacaagaacaaggaggccagcgcacaccacccgcatcgccgacgaccgcatcaccgcaaaatgcgctggtcgtcggtacacaaggcgctgctggagcaacaactgtacgtggaggctttcaggacggagctgcgcaacggtgcgccattggacccctcgacgagacagggcaagttcaagcagcggtatgaagaaatatacccgctggatgtggtgctgctgttacgcgacgttgccgaagacgccgaggagcgtgccaatgaagaagctaaagcgtcagccaaagaacacgctaaaacacaggcggctcaaggcggtggtggttcgtggtactcgtacttcttcggcggtgaaactgaatctgcctccgcgtcaagtgaagcagcagaggagcacgttttgtccgctgaggggcgggaaaatttacgcgaggcttacaatgacgctgtggagaaggctagcaacgcacacgaagtgccgatggggtgcaacatggcgtcagtgcagcttcagctgacgaatggctcgataggtctgtatcaatccaatgcacacgagagcccattcgtgactggaatgctgagtggctcgctagctgtgaacattcaaccggaaaacgagtgggacgcgagcttccaagtgcagcacttcgacatctttaacggactcgcgcgcgattcccgctttcactcgttctgtagcccgtcgtcgtcgctgtcgccgagtgaagacccgagtaggccctgcgtcagtatcgacgtgagtcgtcgggcggtgctacagactcaactgcagggtgacgacgacgtggaagctacactaaaggtccgcgtccgcagtgagcctgtccgaatgatggttgatccgtccttcgtgatgttcttgcacgctttcttcgtgagtctgctaccagagaaacagctagagagggtctggcagtttgctacgtcttctgttgcggactggatgtttactgatgactctgcggacgagaggaagctgatcgagtcatcaaacacgagtgcggagaaagaggccgaggaagcggagcttatgcgctcgctggagagagctgaaggtcgcgtcgcctacgacgtcctgctagacatggaagctcctgtgcttatcctcccggaaaacgtcggtgagccgactggcgccgttctagttgtggatctcggccggttgagctttcgcaacgacgaacaggtaacagctatcgacacgcctttggaggtggggctggaaccggctggagaagacccgcgtcgtctgcattggcggctagacgtcacccagatccatgttttactcggacgccaggagcaattggtggactggactgacgaagaactccgcggctttaccaagatcgtgaaggagctgtcggttgaattttcactccacactcaggcggcgacttcacggctcaagcttccttcacgtaccgggcggaaaaatgtggaggcgaagccgctgccgcaagtgggcgtctacgctgccatcccaaatatctcggtatgcctagtggaggagcagctcgtggcgctgggccagatccattcgtccatagttgcacaagcagcgatcattgcccgagataatggtaggcgcctgtcctacttcgaggatcgagatcaggagagtggcgacgaagagagtgcgacggagtctgaaagcacgaacgatgaaggtacgagcaatgccacagtcgttcccattcataacgttgaggagaaattcctgctggagatggagctgtcgcttggatgtgtagagctcaacttgcgtgagtcggttgccaaggacgcgtttatcttgcgggcctcgcaaacatccttctcgatggaggcatactcaacccaccaagacttccacgcacgactgaaggccctagtgatggaggataaactgtattctgctgagtctcgttactacaaactcatatctaccggcgaagatgacgcaggcgataccccacacctgatcgctatcgacatcacggcgtattcgcaggacaacggagcatcgagaatacaagaaagtggtcaggcttcgcaactggaggctgatgtgcagtttaacgtgctgcatctgcaatggaacccgtcgtctgtggcgctgttctaccgcatcatatccgcgtatgcatctgccattcagtctcacgacgacgacctcccgtctgaagatgccacgctgccgcgaaggttggctgcagagaaggagactacacaggagccacgtcctgttggtggccacaagaaggaggctgccgcgttaaccagtctgcggtctagaggaaagcctctcgttgtggtacgcgcgtcgctggtacaattcagtctgacgttcaacaaggatcagcttgatcgccagctcgcgcgtctagacatcagtaacgctgctgtcaactatacgagctacgatatagaaggccaaagctccgctgacgaggacacattcgaggttactggtcatgtggggaacttcgtggggactgacttgagtacgtcgaagcatccgttgtactcgccattactgggtctggacgaggaggaagctcggcgccgcgttgcctctgggatggattcagaggcgctgctgacgttcgcgtttgtgcgtgaccccaagacgagcgacaagagctctctgcgtctcgcattcaagccgatccggggtgtttactaccatcagcaggtcttggagctggtggactttgtgcttgaaggggttcttggcgcgatggtgagccagacgttgatgaatgccacccagctactactgcgcaaggatgaggctagcgttgtgctagacttgaccgttgagaagcccaccctgattcttcctctaagcttagaggattccccccacgccaaggtcaccgcggacatgctgcggctcgtccactttccgtctagtgcagtgcattacgaagggccacctggagcaagaaccaagcgtgttgtccacgacgaaccgctgccgcgtgccatggtgcgaagatccgacgccgaaggaggcggcgtctcgttgcgagtagactgcaaagacctcttcctagagcaagttcgaatcttctgcacgactacgagtgcaggcaggcgagccaagagcgcgggcgaagggcccatgtatgaagatttactacccaagcctgcagatctgaagatcagcattgaggacctcgtgtcgtcgagtatttccttaggtgacgaggagacagtgggcgatagcggcgaaacgaggacggcgttccttccgcgaatcacggtggattcggtgcttcctccgttagaggcccacatctcacgcacgagctacctgggcatcgtcgcgctcatcttggagaattttggtgccgatgcgctgcagaatgcaccgacagccgcagctcctctcggcaaggcaagcagcgcttctcgactcctaagcaggagaaggagtagcgctgatatcggagagcttccgtccttgcgcccaaccgtgacgtacacgtaccttcaaccggacgcagatgaagctacgcttcaggtgcgctttgtcatggagagcgtgaggatcctgctgttccaggacgggccggcagacgtattcgtgacggaaaaggcatcccctgatttaattgtgcagcgcaccatgtctgaagctgatagcgacaagtttgggcgtggtggggagttcgctgaggtcgttgctactgacttttcgctggtgttttacgacgagtacgagaagaacccgcgcttagcggtgcatcttggtgcgttcagcgctcgtgatctggtggggaattacaaaacctcatctggcggcgctgaaggtggcacaatgctgatctcaccgcgcccattggagatacactacacgtgggacgacgctgcgctgaccggcgagctggacttggctttctctgaggtcacgggcactgtgatcccggaagctctactagcgcttaccggcttctttgcgctgccttcaagaccgagtcaacccgaaaagcctcccagttctggctcagtgaaggatctagtgcgatcgcagacgccagtgccaccgccgtcgccgtcgttattgacgcggcgcgaaagtatctcggacattcttcgcgacgggaaggaaccagaactgacgattactgttcgtgcgacggccaagcaagttggcgtggcggtaccacgcgattgttacgacccagagagtccgcgcgtagcgtttgccggtgatttcgcgcttgaattcaagtggaaaccgcacccggacgataagaaggggaaggcagacgacgaccttgacattcagagcagcattctcgcggacgcaaggaatatggagatcgtgctggagaacgccaggcgcccaggctgctgcgtggcgtctccctcgtccagcacgcgatgggatgccatcgatgttgcgccgctgattcagttgctggagccgtgcgatttgcacgttgaagtgagcgacctgttcccgcacgccggccagaggcagcagattgtggcgctgagcttcactccgattgaagtgtttgtgtcctatgacgacgcgtgcatggcgatggatacgatggaggcattcaacgaagctatcgtgctgcacgaagcacgccacagcaccgcagatctccgtcggccgtcacgtattgatagcccaacttcccatgcattgacgagatcacgcacctcgtcgaagagcatcgtggtcgagacggctacggaggaggaaatccaccgatactttacgtgtgaactaccgtccgtgagtctgacgctgatcaacgactgcgacggatgtgatatggggctcgcacagctgcaagtcgagcgctgccacctcttcttgaacgtcacgtacactgcgcaactggaggagagcgacgacgcgcccgtgtcctttgtcgagctggatgtgtctgttaccccactgacgacaagcatttctggaggaggaaacttggtggtgctcatgtcgtactacaacccggacacgcgcgattggcaccccatgtgtaccgagtgggctctcgatgcgtcggtgcagggctcgatttcgggcgcgagcgagctgcacgttattctcacggcttctcaagcattggacctcactgtcacacatggattactggaggtcgtggcgtctgtgggcggcgcgtggaaacgtcgtgcggctatgggcactgccaaggtgcagtcggacgagagggaagatgaagacgttgagcggcggaagatggcgccgtgtgtgatccgtaacgagacggggctgccactcagtttctggctgacgaatgggtccttcacgacagagccacaagtggtgtcaacaggaagcctggctgacgttcggtatctccacgcaccaggacgagggcgtggagtcgtacggaggtatgcatcgggtgacagggatgctgccaacctacgactctgtttgcagctgatggatgcgaagagctcggaggacagtgcagcgcgattccaagccgttcaagggctcattttcgagcagttgggtgcgcgcacgtttcctttggtggacacccacgggcagcgcaccaatttcacgctgagtttgtcggcgcagctcgttgaaggccgcattttgctggttgtctcgtcccctatcaagcttgtaaacagactcacgtctggtcgtcccgtggcgctcctggtgaacgacccgacatggcacacacccgtcgagattggcgttcttcgagcaaaccaggaatctgccgttccagttctgctgtctttggcttcggagctgcgcgtgcggcctgtggggaacggcgctacatattcttggagcgctcctatcccagtgcagacacggtccgctgtggagcttaaagtggaggccgccgtatcatccacctctgcctcgcgtgagagctcgagccatgctggggacggtcgaagcgcagtgtattgcgtctccatgtcaagtgataaagagcttcgtgctgtgtctttcgcggaaccgcttgtattggtgaacaagcttccagtcccgctaaccttccgtttgcgttctgcctacagttctgcgtacggatctgggtcgagcgatagcccatcgaagcccgagacgatcgctgtcggagccaaaaccagcatctggtggacggatatcgcgcagcgaccgctctttcaactactagttgagggctgcaccagtccgtccaagtggctggagctcgtgcctcgaggaaccgccagcggtgccgtactatcggtacagcttactcgggtcgacgatggacgtcctttccgactgcttctgcgtgtggtggggggcgaccacgctgcccgccctgtgcgcgtggagattttggctgaggtctgggttatcaaccgttccgggctggagttggtctacggcactgctgcagatagtgaagcctacattcctccacgcgcggcacgagcccaggtaggcaacgctcagatcagcgcgtactcgagcgataacagtggaaaggtccccgtggttcgaatcggtttgcgtggctgcaactggtccgcgcgatttgaagcggaccctagaagactcagctggcaggacgagtgcatcacgcttcggtccgcaggaagcagtgcatcgtctggcggagttctgtacgagttgggcgtgtcagcggattacgcgacccggcacttcggctctgtcacgacgcttgtgagcgtcatccctcgctacctgatcctcaatcgctcatcgcacacgctgttacttcttgaagctcctaaccgccagcaccaacgtcttgaagactcgagcaacgacaatgttgcgcaccacgtactgggagccggggatatgtatgctctttactgggtaggtggaacgcgcgccccactacgtgcatcagtgttgcccgacgatgacgcgccgggtacgttctgttgtgatggctatgactggagtgctgcatttgctgtcgaccgtgtggctaagtcggacttgctggtgccgccacgatccagtggacgcggtgttcacttggaggtggtcgttaagcgaggcagtttctcgcaggccacgttcgtagtggtggtgacggacggtggtgctggatctccgacgtctacatcttcgaggctgtcgaacgctgggtcaacggtctcttcctctgcaagggatgcggtcacaggtgctggcacggcaggctggcaaacgttcagtcttcacgcgcaggtagcgggcgtgatcgtgacggtcaccgataagaagcacggcggggcattggaggactctaagagcttgttcgctggtgggcctgagggcgagagtgaacctgtggctcgtgcgacgttcacgcgcatcggtgtggaggcatcatggtcaccacaggccactgctgctaagctgaacttgatggggctaaaggttgaggacttgctcccacagaccaggaaccgcgtcgtactgagacctctgttgcacggagacagtgcgtcagcgaaggcgaccatggacaagtacttcctggagctgacgtatctggagcgacctcacgcgaagtacacgtgggtggagcgcgtgcacctggagttgcagaacatcaaggtctcgacctcaatgagtttcgttgacaggctcatccagctccagaaggagacgatcgcacatttccagcacaagtcgctcgtctcggccttccctagtgaagacgatatcaacgatgaggatgacgaagacggggacttgctggcctactttgttcctcagacagaggacggggacgagggtgtcagtgctgcggatatggcagctatgactggccggaagctttacattgcgtcgggtgagatctcgcctgtgcgtgtggtggtgagcttcacccgcgacaagagcgactcgagccagcgcaacaacgaggggttctggctgtcgaacctcaagctcaagatcgacaacgcgtgcgtgacgctggagggctaccgactatcgcacgcgctggccacacaggagtctctgactgcggcgattgttcgcttctatgagcagtcggttaaatcccaggcgcttggtctgatcgagtcgatcgaggtcacgtcgctcgtgacgagcatggtggcaggtggggtgacgtcgctggtgtccactctgcgtggtaaagctgacccggccgcggctgctggtgctatggctcctggaatgctgacatccagctcatcaagtagcgacggcgacagttctcaaggtgtgcccttccgctacgagcacatgtcgaacggcgagatcctgcgcaagcattcgaaggcgctgggcgagtgccgcagcagcgcagagttcctgcggcaagtgcgacacctcgtctacgactgggatgccaaccacacgggactcgaggcgcgcggctgcgtcgcgcttgcgttgatcaacaattctcggcactcgttagtggtgaacacgcagctgaacgacggcgcgtccctgcgcgttctgccgcttggaagacggcaccttgccagcgtgttggacgcgcctactgacagcgggactgcatcagctggaggagggagcgccacagcttggcgagcagaccgtgccgtggtggtgttcgcctacggctacacgccaacgctgctcacatcaggcgatgtctacttcacagtgcagtcgaatgcgtgcagtgtgtacgctacgcgcaagacagcgcggctcagagctaatcggggctacactgctacattcacgctgcaggaaacccagagctggtggtcggcgaacgtggtcatcatcggtgacgacttgcaggctggtgataactccacgactgcgtccgattcggactcgctgttcggcgagacgccggcactgatggatcaagatactgaagcagcagacgacgaggacgatgagttcgaggtcgagttctcgggcgcagcgctggggttagtcgccaagcagagtggccggctagtgattgtgcgcgagtgcgtgccgtcaagtgcagctcaagcttccggccggatcgctcctggtgactgcattctcgccgtgaacggcgtgagtgtggccaacacgtcgcagttcaagcagcttgttagcaaagcgccacgaccgatcgtgttgcgcttccgacgcgcaggccgccactccaacgcggcctacgacctctttggcgagcgcaagcagtacggaggagcgtccaacctgtttggctagtgacaatgatgcaatagatgacgaagtgaagtgagccattcttgtcctggactgtagacgaatttggctgctcacttcaacttgaagggggagtttcacgaccaactaactgtggtttgtttcttgtgctaaggctgttgtaggatgagtagcaaggatggatctatcacacgactgccagcaagattcaagcgtccatggcagagcaacaagaaggaagaggccaagcatgcggcgtcagctccagccgcggcagtgcaaaacaaactcgcagagttgcgttcaaagcgcgtgatggaatttttccaagccaaagcgagacaacgtgccggcgcccgatcacttgcttcagttgtaggcagcagcggtgacgctgtgatggctctcctgcggtcactgcgtcatctcgctgctggcttcttcaagcgcaagactcagaatttaactgcgttgatcggccgagagtccaagtggggcaagaggttgcgattgctaccgtcgatgctaacaggcgagaagggcatgatccagaacaaattgaggagaacgtttcggctcggtagaggcaagaaggctcaggccgagcgacagcaccaagtacgcgtctaccagtggatgtgtcgggcgttggcccgcttgggctgctccgccatcagcgctgctcggaagcgctacagagctgaaggcgccgcgctgctttctcgtgagctggttggccggatcatggacgagcagcctccgattctagctctgaagttcgtcgcaatgcgagagcgtgagcgtcgcgcgaagaatgctcgagtgatacagcgactgtggaggcgagtgaagcgcaacgagcaagcaagtgccgatgcaaaggtgcgtatcctgaatatgctgaccagcatgccgtcgcgtcttcgccagcagcaagagactcagcagcagactatcaagattgtgcatgacgtcagttccagcgctacaaggctattcatccaccgcgcggcgcagcgtttggcagctcgactgatccagcgcgtgtggcgtggccattgcgcccgtaagagggctcgtcggctgcgagagtggaggttgagaaagtttctgcgtagaagacagcgcgatcgtcttcgagatgcgcgcacggccttgttgatgccgtctgaagtggagcagaggtacaggaaggagctcgaaacgcgaacgctcgctcgacagcaagaaacgccactgctgccggttccccgccgagatgacggtcgacactaccagaggagacgaggtgaacgtgccacactgctagagccgctgccgctgcagtcgaggcctccgcagatatcgtccaccacacgcacgaaagtgcagtgcgtcccattcagccgcttcgagaagatcatcgctcaagacgcgcgcgtgaatctgcgtaacgtgtgggtggccatccctgttgggcatcacgagcaacaagaggagacaagctcaagacacggaggcttgagcccgctgttggtggggaagggccgtaaaaagagaagcaagggcggcctgcgcacaacctacgactgggtgccagcggatttactacagagtcaagaggagagggaggtggctcgagttcgtcggcgacaacgagctacaagtccgtcagtggccaagaacatcctggagttttaacattcatcttccttccaagctgcttatacaaactacacttacgctacggtcaccaacaagaaacagtgcggagctcattcataccagcgagcggcggtagtagaaccgatagccggcgtagagcacccccgggacgaagaacgcgagcatcagcatggccgacagcaggctggtgcacgcgtagaaggtgatatagccgaacatgaaggtcggcaccaccgcgatggcgtacagcgctggcactccccctggcaccttggtcggacgcgcgatgtatggcaactccttgcgaagtttgatgatcgtggcgatgatcatgagctggacgccggccgagtacgcgttcgtcatgacgagcatgctgtcgaagtccaggttgatgagcgccagcatgagcacgagcgtgagcagagcggcattgtacgggctctgatacttgggatgccgcttggacagcaccttgggcacgaggcggttcccggccatgccgctgaccaggaacgtcttgacgtgtagcgccgccatgcacatgccggccgagccgcagcacgttgcgatctggaccagcgtacgcagcggactgccgccgacaaagtacgcgaagaacgggaaggcgtcgcggtccagcaggaaccagggcatagcatccgtcgcgatgccagcgatcattgggaccatgtacgtcacgaggatcatcacacacgtgtagccgatggcgcgcgcgtacgagtgcgcggggttctggacttcgccgccgaagaccgacgcgttgttgatgcccttgaacttgaagtaaagcgtgttgagcagcgtcgcccactcgatggctatgtcgcccttcgagatctcgtcgtgcgccgcaggatcgtacaggacgctctcacgccgcacctggaagatgtcgtcgaagtccgacgcgttggccagtgaccagatcgtaaacacggagaagaagaggatgacgacgaccaccaccacgaagctcagtcgaccgaccgtgcgcgtgcccaagaaggtggggatggccagagcgatgccaattcctgccttgatgaagtacgcggccacggatgacttgacctcgacgttgtagtatcttgtgagcaggtttagcagcgtcccgggcatcaacgctcctcgcagcacaccggcgacccacgaccagtacccaacttggaaggcccagaacgggccgtacgcgttcaagacccagaccgtaaagccgccatctttcggaaacgcggagcagagttcagcgacgatgaacgcgaacgggaaggccacaaagagcgcgtagagcaagaagccgagaagaccaaccagaggccccgccgaagagatgacggcctcggaaccgatggggacgatggttcacggcgatagtgtgtcggtactcgtacagacttggagaccgctcgaccatttcggcctctttgtcgaattcactgcggacgtcagcgtgttgcttcaacacatgtaaacttgatctgtacttacacaaacgccgcggcaggtgccgtgtcttcgcgtgggaggtagaacgtcaccttgggggcagtacttctgagcgcgtcgtcgtctcccagcattgggaggtcgggggatgctatggtaccagcgacggtatttgctagtcggacagaccgattatcccaacttgcggcagtggccgctcgttggcagagactacaaggccgatgcagtgggcaccctcttgttttacagaccaactggcccgtggagacatacggtggcttgcggccatattaccagccatagggagaagtggacggggttcaagaggttgactcaacagcgaatatgtacgactggggcgctgcaatacaaaaatctccgcgatcttgaataccgaaagggtgtagatgtatagactttgtaaagtgcgaaagcgattgaaatagttttccagaaatggtgaaaaaggcaaaccgcggtacttgtcattcccgaaaaacagtaccgtagtccagaaaactgtttgccgccgtgtccgaccgattcgacgctgcttggccgaagcctcggaagaagcgtgggcggacggattgcaggatgtgtacgatgaggccgctgcgacgttgaagcgcttcctccttaccgtcgatagacccactgcaaagctctctgcgacgcgatcgccctgatcaccaactggtgccaactttaacggaagtaaacaattctatagatctccgcctctacatacccaagctcaccatgggagcaagtggccctcgagttctggaaagctttctaagaccagtcacgaaagttgcatacctcctcggcgcaggagcaggagaaataaaaatgttatgtgtttgtagtttttgctggcttgaatcatatccggattgagtggataacagtttttcaacttcaaaacgtcttggtcacaagtcttgggttccccacccacacaaccatctgcgtcgacagtctctgcaatgttgggcgagtcggcaagttttgcccctccccatgtccatgtccagttctgactcatggatggaggcgatgaaggtcaagtccacgccccggttgcgcctcaagagcgaaatcacgcgagcgcggggggcagctggctgccagtgcaagtatcttgcgcttgatatgtttggtcttatctcgggtcaagcgcggtcattgcaaacggccatttggcagcaaagtgtcagcgcttccaggcgtttgcggaccacatggccggttctgagcgctgttctgttcgctgtaggggcacgccagcagagcgagcgacccagttgcgctccacgtgtttgctgatctttgccttttgcggagcccgtcgtgggcagcccgccacagttgaggcagatgttgccgcctatagtcagtctaccgcagagaaacgagcggacgtgcggctcttcgctcactcgcgcatcaaccgaggactgcactcgttcagtcgggtatttctcctcttgccaacgcgagctcaaccttcgatccacccaccacaatggcggagactgtatcaactgaagctccagaactgacacgtcgagccacggccccggtccgacttcaagagctgctgcaccaggccaagtacacccctcctgctgtcgaggtgccaaaggagacgccgctagctgacggcgaggtccaaccataccgtcatctcgcgcacagcatcgtctcaagaacgctggcccatgagatggagcaccgccgcaccaagggccccgaaatgagccagcgcgactggaagttgctcaagcgccacaacgagctcagtatctacaagcgccgggccccagagcagtcgcaacaaacgcagcggcccatggttctctgtgtcggatcaatcgccggagacattgaagacgtcctctacggagtgcacgccaagacccgagaggagatgcagatggtgctgcctcacatgaggaagggctacgttaactgcgcgatgctggccaagctggagggcggttcggacactgatccgtaccggcagctcgccctcaagtggcacatgacggatatcctcggggacgccaaaatccttaagcaccgtgatctatgcaaactcgagtcaatggggatcagcaccgacgcgcaaggtgagcggtacggctactatctcctccagagcgtggactttgccgggtgtccgccgcctcaggagagcagcgacacgatccgagcgaacatgatgttctgcagcatctaccgccaggttcctgggtcgcacattgtggaggtctacgcaaagggaatggttgacttgggcggtgacatcccggccttcctggtctacaacacgtcgtgctcgcttatggtgtcgatcatcagcgccatggaatgcgccgaggcgaagcggctcacgcttcttgccatccaaaagtctgaagatacggcggctccagttgaagacctctccaagcttgacctggaggacttcgatggagagaccaccccctccgggtactcgaactcgggctacagtcttccgtctgaagtcacctcggggatcactgccactccgatgctggctcgcctgttgtcgaagacgagccgaaagtctcgctcgcgacgacaggcggccgcagagccatgctgcgtgtgtaccagaaagcctgcgatggcgtcgctggtgggagctacgcaccgcacctgtggtgtgtgcctgcgtggtgtctgcaacaagtgccacgtcaagcgccgattgtttgcccggccacacctcatcccagtggcgtgctgcaagtcgtgtcttctggaagccaagcagttgacagtggatcctctggagccatgccccatgatccagtaagtagcgtttcagcaatgttgtagggcgttgtttcatatcgtgatgtagtgtattgcgtagtaatgtaaactgtcttggaagtttgaccattcttcgtttatagttttgattactgcagatgcactcaattttgagcactttcagtgaattctaatgtagtgccttacattgagtttgcgtcttaaacgaagaccacatccgatctactaatatcagacggagcatggtttaggtttggttgtaaaggaagtcgatgcggttggcgcgaatgaatggtgcatctggcaggtaatcaatagcgaggcaacatgccaatttacgtgtatccatgtattgcagcttcaaagaaaataagattagtagctttgtaacgcatattcgttagaagtgattgaaaaattttcaaaagtgctgagcactctttggatacctctgcaaaacgacaactaagttacagaaaagttagatcgttcccccgtcagaggtacacagggctaagcattgggagacaaacttaacggcggtgaaccctggaggcaactggttgcgctgctagcaatcgttctgaccgggacagtccagtgaatcaattgcaccgtttccatggcgtgagtctatcaacctgtcaggcatcatgtggtgcagtgatttggcggtaaacgagaatcgagctgacgaccaagcttcagtggcgacccgagtcgtcgggacatgttcagcaatgttcggcggatgctgattggccattctggaccggtgccgaagactcgtcgacacccaagttcgacacccaggacttcaagtacgatccgaacttacagcgaactttgacccgagatccgcacttaagacgaccgttcgagccccggcgactgctccaagtcttcatcgtccaatagagtcatcgaggaggttctgaagggtcggtggttacttgggaagatccaaaacggacgcgtttatactagatatttgtattgaaccataggaaagagaagatagaacagataagccctttgggcaacaagaacaaaacagctttcctcccaatcactcaaggaagacgttcgggctatcggtgagttcccgtagcaattggataaacctgttggtaggattatgactgtcggtggacgcgcctgctagtatcgtagcgtgcgtttacccgtggtcaggccaagagtagtgaagaagtggccgtgtatacgaagggcgagtcatcgccgtgtagtggaggagcgagagcgcactccatttatccttcccgtcggagtatagctccggcaccctcgtatcaagccgtgactggctgggacccttccttcctgagggcctgcgaggtttatattgtgtgtgagagcatgccagccttcgctcgtggctggtgacgctggttttccgtcagttgactaagcggaaacacggtgcacagaggaaacgaaacgtcaacccggtgcaagggaaagttcctgggccttcaggttctaaccctaacaagcccattgagtcatcgggacttggtgggtgttgttggtggggaaagtgtgctattatataatttagtgcgtgttcctacacgacaactggcgccgcgacccgggattggtgtgaccttcggtgtctcgtgttacagcaggtcaactgaccttacgagcaacaaccaagaagaagaagaagaagaagaagaagaagaagaagaagaagaagaagaagaagaagaagatggcgacaggatctcaatccgcggtaccagcaactccgatgaagtccggcggaacgcgcggcgacgactcgacggcggtcttgatcacaccgcagcctgacccgatagctgagcgcgacgtcagcttcgtcgagccgatgactggatccgacgccaaggatgaagagatggatgaagaatacgacgactacctggaggagaaggcgcctgcgccagcggtggtgacacccgagactccggaagatgcagtgatgtccgccgtgcgcagcggaggctcgcgctctctggcgcgaagtctttcgagcgaggtggaagacgatgcgcctcccatcacgcgcaacctcgcggatgaattggatgatgtgaacagccccaaacgtgccgactatggcccgggtgcatttgaagacagcggcatggaggcattacatgcacgtgccccgaagacgtgacggtggcaccgatgactcagcggatccggggacgacgagtgacggttctgacggcttgccagtgggcaatgatccggaaccgagcttcttgggaccgggcagaaggagtcaagtcgctcccgacgactcgccagcctatccacaagtggccgacattgaccccgatcaaccctcgataactcggtttccgactgcagcgacagagcgtgacgcggatttaaaaccccattgtgaccagaccaacggagcgccgacaactcatctggttcctagttgcgatgcgcacgctcccctcgctgtgtcggagcatacctccatgtcggtgatgagcgtaatggatgtgggcaagaacggggcagcaagcagcaacgcgtggtcaccgattgtgtgttccccgacgactcgtgtggcaacaaacttctcgtacgcacggctcccgaagactcatacgggtttcgtgatctctttcgcggctttggctaaccctgagaagtatgaaggagataccagttgctcatggatcgtgtggcgcctaccagagtggaagatagtgattgccgtgaacgctcaccttgtcaatacggcggtcgactccgcagagtgcacgggtttgagaaacggggtgctcgcggctttggaacatggcgccgagaatttgatcattgctggagacttcaggcttaagatccccgaatcactggggattcgctcatgcggtgcggacctgttgatgagtccgatacggagtagcgagaaggtcgcagcacggatgcagtctgctaagtatatccatgtgacacgagactacaacgctgctgcgaactcactggtgtctgaagctttggaatctcagacgtcgaaggtgattttgagtggcgataggaaggccgagctctctgaactcaattgactccaagctacgatctacgaaaccgatccagacgagatatcgccgccgaacgtgcttcccggtgattcttttcggttccaagatctccccagcagtagttcaagaagcattgagcctaccatggccgcgccgatgactcggtcacaggccaagctcaagacgaagccaccgatccggaccgacaagacaatggaaccactgccgacgactggcgaatgcgagttttgtgtaaacagtgcaggttatccagagaacggacagaccaacagcacaccgagatctcgcgtagcctgggtcagtcgtatctggccgtacatggagcggggcaaagaggctgatggaatagaggtctctgcgtacaaacctctgcggcctacacgcaccaatgctgcacgtggactttgctggaagagtgtcgtggtcgtgcggaacgcctagcccccgtccgcgacaactcaacctcacggtgaactgcgcctggggcaatgcaacccaggagtgcagacgaaaatggctactgcagctttgcatgctacatggagattgaacgcgaatgatacgaatggagaatcccgattggaacgaactacaacttcccccgacaactcaagggcagtgctggcgaagacttggtgtgcttggagctcgggcggatggcgctgacaactgccgatgactcgaagcgcctgaagcaggatctacgctgagtcagacgcgctacggcaagatggtggctgagaagtgtttctgaggaccggatcggccgcaggaacttgcagaagcctatgcgcaaggagctaccgcagtctacggcctcaccaacctcgtccaggtcatcacgcatcatgatgctgatcattgtatggttcccgagaaccgggtgattgtacagaatcaagccgagcggtcatggagtgtcgtgccgttgtctacgaagtagagtctgacgaaagcgatgatgccaccgctgctcaactcaacaaaggtcgtcgaacggcggcgaaggcggacaagatgtcggcactataccggacgaggtcgaagacactatgcggcggtcgccaacccggccccgacggctcggtgcgaacccgagttatggaaccaggtaagcctacagcagcgagccaccggcagcacattacgacaacgcagacgcataccaagcacgcaaccggggcaaacaacaccagatgtcgttaacagcgaaaggaagcagaagcagaacgcaccacgacgctcgccatcatgtggttcacatagtgttgggggcagctgagttgtagtgatttggcggtaaacgagaatcgagctgacgaccaagcttcagtggcgacccgagtcgtcgggacatgttcagcaatgttcggcggatgctgattggccattctggaccggtgccgaagactcgtcgacacccaagttcgacacccaggacttcaagtacgatccgaacttacagcgaactttgacccgagatccgcacttaagacgaccgttcgagccccggcgactgctccaagtcttcatcgtccaatagagtcatcgaggaggttctgaagggtcggtggttacttgggaagatccaaaacggacgcgtttatactagatatttgtattgaaccataggaaagagaagatagaacagataagccctttgggcaacaagaacaaaacagctttcctcccaatcactcaaggaagacgttcgggctatcggtgagttcccgtagcaattggataaacctgttggtaggattatgactgtcggtggacgcgcctgctagtatcgtagcgtgcgtttacccgtggtcaggccaagagtagtgaagaagtggccgtgtatacgaagggcgagtcatcgccgtgtagtggaggagcgagagcgcactccatttatccttcccgtcggagtatagctccggcaccctcgtatcaagccgtgactggctgggacccttccttcctgagggcctgcgaggtttatattgtgtgtgagagcatgccagccttcgctcgtggctggtgacgctggttttccgtcagttgactaagcggaaacacggtgcacagaggaaacgaaacgtcaacccggtgcaagggaaagttcctgggccttcaggttctaaccctaacaagcccattgagtcatcgggacttggtgggtgttgttggtggggaaagtgtgctattatataatttagtgcgtgttcctacgatagacacatggcagcatgggagttctgagtcggcgcagctgggcattaacatgcggggctaacacagttcaccactgctaaccgccatgctgaggcttgtatggtattcatcgccgtaatggtttctgcagcgataaagattctcgtgtccagcctctttccagcctctcactttcatattatccacaacaatggcggagcctctacccaacgaccatgacttccccgccccggaggcaacaagacgagcaacggccacaagtaacccactagagtcgtgccatgatctactgaaccagaccaggttcacccctggtatggtcaagggctccgctttgatggatctgtccgacggcgagacgcaggctttccgccacctcgcccacagtatcacttcgcgcacgctggctcaccaaaatgcataccagctcatgaactgccccgagttggcccgcggtgactggaagctgctcaagcgccagaacgacctcagcgcctacaggcggaggttgcccacgcaccacgaacaagcgcgggggctcacggaggtgaaccgacggatggttctctgcgttgggaccatggccggaagcctcgaagacgttctgtatggggttcacgccaagacccgcgaagagatgcaactgacagccccccacctgagcaatggccacctggactgcacgatgctggccaagcttgaggggggctcacgactcgatccgttccgacagctttcgctcaagtggcacctatctcagtcgattggcgacaccaagttcagccacctccgcgacctgtgcgtgctcgagtccatggggatcagcactgacgcgcagggcgagcgctacgcctaccacctcgtcaaaagtgtcgacttcgagggctgccccgcgcctccgaagggcagcggcgtcatccgagccaacgtcatgttctgcggcatttaccgccaggtgccggggtcgtccgtcgtgactgtatacgccaaggggatgttcgacttgggaggtaacacgccctcgttcctgatgaacaacacgtcctgctcgcttatgctgtcgatcccccgagcggtggcgagctccgaggccaagcgtctgacgctcctcgcggtgcggaaggcagccagctcggtgtcggcgtcgtgcggagatctgtccactgaagacaacctggacgagtcgtatctgtccgtggactctgtctcctccgggtactcgaactcggcccacagcgcctcgggcgaggtcgcatccgtggcgccgccaactctgcgtcggttcccatccaagggcatttccaagtcgcggtcgaagcggcagcaggcgggaggcgcctgttgcgtctgcgccaagcaaccggcgatggcgtcgatcgtcgcagcgacgcaccgctcgtgcggcgtgtgccagcgcagcgtctgcaccaagtgccgcgtcaagagacagctctacgcccgcgcccggcccgtggccgtcacgtgctgcaagtcctgtctcgtcgaggccaagcaactcgccctcgatccgccggaaccgtgcccgatgctgctgttgtgaagggagggcccactgtctgtctgttattagttgtcagtcgtagcgtatcaatgcgtaacttttggagcaaaaagacaacttgtcttcaatgtgatgtagtttggtgtattgaacacattttttaccggccgggccaaccattggctctcgccgcttcggcgcccgtgctgggccgtgctccgcccacaatacagtctacccccgacaccgagagaggcctgttaggatgtcttcgctgacgctgtcgctgccgacgcccccggcggacttcaaggagcccaatgtcgtgctgggcctgggtggctacttcgcgcagaagcgcgtggagcccgtgggccgcgccttcaacaagcgcgcgcgcaacatggcccgcggccgctcggccagctgcgaggacctggacgacgccaccaaggcgcgcgacgcgctgcgcaagcaggaggagtccatcctgcgcaagtaccgccgcagcatccgcggcaagaacttcctggagctgaccatgtaccagcagctgggcctgagcgacatcggcttcgacgtgacggacgagcaggtcaagaaggcgtaccaccgcgtgctgatcgagcaccacccggacaagacgggcaagacggagaacgaccccaactacctggccgtgcagaaggccttcaccacgctcatggacccgcagaagaagcgcgcgtacgactcgcagtgcgacttcgacgagtggatcccctcgggcaacgagaagatcaaggagaacgaccccgctagcgagggcaagagcttctacgagctctacggccccgtgttcctggccaacgcgcgcttcagcgagaacaagcccgtgcccgcgctgggcggcgacgatctcccgatcgacgaggtctacgccttctacgacttctggaacaagtttgactcgtggcgcgacttcacgcacgactcggagcacgacgtggactcggccgagcaccgcgaccacaagcgctggatggccaagaagaacgaggccgcggccaagaagaagaagaaaaaagagtacgcccgcctggccagcctcgtggaccgcgcgctggccaacgacccgcgcatccgccgcgtcaagcaggaggagaaggaccgcaaggcccgcgccaagcgcgagaaggaggatgccgcccagcgcctcatcgacgaggagaaccgcaagaaggaggaggccgagcgcgccgcccaggaggccgaggagaaggagaaggaggcccgcaaggacgccaagatggccaaggagaagcagaagaagctcttccgcaaggtcaagaaggccttccgcgagctcatgacggcggccgccgagcaggagctcaagggcgccatcgacgtcatcaagatggaggacctgtgcgactcgctcgagatggaccagctgcaggcgctcgtggccgcctgcggcggctccgtcgacaagctggacgcctcgggcctggccgccgtcaacgacgccctggccaagctctaagtagccccgcgcctcgcacgcgtcgatgcacagcatacagagtaaccgcttcattaacatacaacaacaagagacgaagtacacatcaaacacacttcctaccgtcatcaatcatcctagtctttcccgccgaaatggctacatctgctgttcaacgactggttaaaacgaattttacagcccacccattggatgaaatgggcgcttagcgactgggcctcgacgctcaaggcgcacttcactcttgctttgcttatcagacagaactcatggcaagtcgagtccttggcgcttcctctgtctaatggccctctaaccaccgctcgtgtcgtgcacgtgcgtcctgcaggtccgcaagaaacagttcatcaacaagaagtcggcgcagcacttccacgtggtgcaccgcagccagcgcgaccccaaggtcaacgaccctgacgcctccaagtacgtgctgctgtcctcgagccagcacgtgcgctcggactccgagtccgactatgacggcgatggcgacgacgacggcgacgactcggagctggacagcgacgacgagatgcccgacctcatcgacacgcccgcggcccagagcagcaagccggcggccaaggccaaggccaagaaggccagcagcagcagcaaggccaagcccgccttccccgtgcgcaaggtgcgcttcggcggcgtggaggccgaggacctcgtggacgagaacggcctgccgcgcgacggctacgactactcgcagcacatgaaggagatggggcagggcaagttctactcggccaccagccgcttcgacgcgggcgaggaggcccgcgcgctgtccaggaaagtggacctgcccgaggacgcgctgcccagcgccgaggagcaggaccgcctgctggacgccatcacgctcacgacggacgtcatggacgaggacctgagggtggcgctcgtgaacgacgaggcctttgaggagctggacgacaacttcgtggtccaggccgccgaggagaatgcagacgacgcagacgcggacgacttcgactacgacgcgcacatcgccaagctcatggaggcggccagcggcatcaccccgctgtaccgtggaaacatcacggacagcgaggacgaggagtttagcgacgatgaggaggagttcagcgacggagaaggccagcccgaagacgtcgagacgcccgaccgcgacgaggagcagcgcgtgctggacgagctgttcgagaagacgctggcggaggagtacgatgacgaccagctgggcgagctggaggaggacgacccggagacgcgcggcaaggagacgctggacggcgagctgctggccgcagtggtggaggactacgtgtttgtgcagcaggaactggccgatgccgagggcaagctgggcaaccctcttcgtgcgggcaaccgcctcaaacaggtgctggaggagtgcgaggctgagcgccacgcttacgagtacgatgagaacgccgagacggaggacgaagaggagcctgaggaccccgtggcgcgcgctgagcgcgaagagaaggagctgcaggagctcttcgagcgcaaccagtacctgcagcgcgaggagcgcgagcaatgggactgcgagaccatcgtgagcacgtactcgacgctggacaaccacccgacggtgctgcgggaggagggcccgacccggcgcaagaagaagaaacagcccgtgatccccagcatcgccgagggcgtggacatccgcaagcagaaggtgacgctgtcgcgcaagacgggcatgccgctgggcgtgttcgagacggaggcgccggtcaagagcaagccggccaagcacaaggagcagcagcccgagaccagtcggagacagaagggcgagaccaaggaggagaagcgcgcgcgcaaggccgccgtcaagatggagaagatggcccggcgcgccgagaagaaggagaccaagctggcgttcaaggaggaagaggcgcggcagtccacgcagaccgtggccggccgcgtgtccgtcttcaagtactaacaagcagtaagatagctagcaaaaggaggcgcggggcaataaaccgatcatgagcatgcacagggcttgtctgtctgctagagctcattgcgagactagcattaatgagctgctgatttcacatcgcttgatgcctctctctctctctctgcagattgaacccgatgctgctgctgctgctactgctagctgccttcaaccaagtgcctatcccgcggttcagcgacgttgcttgcttgcaagtccaacgccgccgtcggcgagcatggagcgtcgagcgagcatggagcatggagtaacggatacggtggcaacaccatgacgatgatggaggccgactcggctcgacgacagccttccaagtggtattggtcaatgtgggttttcaggttttcatcgtgtttcgtttccttgctctgctgctgcctactgtcctactttacatactgctacgctcctatcctgcttaattacttgctaacttaattctctgcctacctacatcctattacactcactcgagtcagaatgggaacgatgatgatggaaaaatttgagccggcggaagggaggggggggtggctcgctgacttcgtcggacggagaggggacagactggggcggggcagcgtcgctgggggcataaataatcagcgtcacgggcttcgtctatcggtcgcatcaaccatacagtctagaagcacaggtccagccacggcatcatgtcctcctcgtcgttcagcggcgacagcggcacctcccaggcaccgggctccacgttggcaagatccatgagcacctctttctcgaagcttaccgactcggcgtcctcctggttcgtcagcacgggcgacggctccaggctctgcggctcgtcgaacttgaggcagtcccgcgagacgatcgcgcacttgttggggttgatgccgccgcagagccggtcgtcgatctggccgggcgtgatgttgcagtcgtccgtcagaaagtcctggatgtcgatgtccaacggcgcggacaagccgctcgacgatttgggcagcgacagaccggcgtccataatgtcgccgtacagcagctcgttcttcatgttgagcgccgacgacagcgggtacgcgtggtccatgtccttcttcatcaggccgtcgctcaggtacgagccgccgaggtccaccgagggcgggcaggcctggatcatggcgggcttgagtgcgggcgacatgttgtccagcgcgacgggcttggccatcggcgagtagcaggcggcgaggcccaggggcgtcggcgtcatcgtggccgtctgcgcgccgctcagcggggtcagcgctgtgttctggtcgggagccttgctgctagtgttggccagggggtcgaaccacgggtccttggccttgccggctccgcggcgcttgatgtgcacgagcaggtcggggcggccctttcggaagaacgagtgctggtagatcgtgagctggccctcctgcacgcggtagaagctgtagaagttgagctggcggatcaggctcgagaagcgccggtggcggaagtacttgggcaggcagtgctcggccatcatcttggggtccacgatgcagaacgcgctgccgcctggcaaagagtagatacgacagacacaaagagcaaggtgagtcacgatccttcacttcaaccccagcaaggggctgaccagacaacgcacctctgcaccaggacacgatcgtggagggctccgtgtccaccatgcggtagagcttgctcacgaacgagccggagctgcagcactcgcggggcaccgagcacttgtcgccgaagtgctgcatgctctgcgcgcgcgggcggcggttgccggtgggcgtggccggcgcgatggcgctgctgttgctggtactgacgagggacgtcgcgtccttcatcgctgtgtgttgctgaactgtgttgctgctgctgtgtggggcgttcgttcgagcgccgcttcctgggcggaaggtggtgggtgtggtggtcgctgctgctgctggctgctctcgacggcaagtgtgacctgcggcgcggctgtctttttgctaactgaggccagcaaaaattcagagcagccagccagctgggcccgttcggccaatcgcggcgcgcccgcgggtattttcggccaaccgtggcgcgggcccatcttcaatgtcacgcccattggctgaatcgacgttgaagcgatagggcgccgcagccgaaaagtagcaatcagctgcgtaatcaaatcgggggacgcgcagagtactatatggtacagtactaacccctaaatagtaatatgcgactgatttttagagcctgacagagtgcgaccacggcggaaatggatgtgaaatgcccagctgcacttaaagggaacgggaatgaatgaaggtgggtgctgtatgctacaagacggtagtagtaagaatattttatttggctctgcaataggtatatcctaaagaggatttagccaaaaccattgacaatgattcgctagatagctacatggtgtttacccggtacttgctctggttcaccgatctataacccttgctggtggcgtggttacggacgaagagttcggcgcgaggaattaccatgatccagtagaaaagtactggatcgtcccccaggccgacagccattttcttcatacagtaaaaaattctaagtacgcccggcacgccacttgcgaacctatcaaccatttatgggctaacttcgagctctcggtttatttgcgggacacctgaaatagatacgtgggaggtaagatttcgaaggctagtgctaaataaaaaccaagtagacttgaataataaataattctctaaagggtgattcacagctatattctgctgcattgtgcaaatgtccaagtcaagagcaagaaaccctccaaactacggctctgctcgcttttcactcgacgtgtctgatctcgaagctgccaaggagttgggactactcagggacgatgttgcagtcgagtcgacgaacccgacaagctcaacgtatggcttggcctaccagctctgagagaatattgccaatccagtcttttcttcacaaaaagcagtccacagcaagcgcaaagatttggctgtgacgtgcggcttccagatttttgtgaagcagaccagtgtgacggccgacaactccggtaatgcgaaatttgcgtgcaaggcgctcaatggaacgcaatatttcgaccggactacaccagctgcccaactcacgtgtccgtttttcgtgagtgttcacgggaaatcggggaagtggaagataacccaggcaaattttgcgcacaatcacctcaagttcgttggtagtgccaaggccccttgtgttgaagggtccatcccgttgccgcccaagcccatgcggaataccacccagcagataagcaagctgacagcgattgtcgagaccgagatgcttcccgcccacgatggatctacggcttctatgtcaggcgccgctatcaggaattttctgaaatcgaaaggaggggacgtaagcgctacgtcggtggtcagaatgaagcagaaaattgacgacaaaattcacggcgacttggtagaaagttaccaaaaactgcgggcgtacttcgagctgatggcgcacaagaaccccggatcggtttggagagtggaaactgccgcggacggatcgtcgtttggtcgagcgtgcttcatccctaacgctggtattcacattgcccagaactgcaaaaagatggtcggctttgacggggtccaccttaaagaggaaatgcacgaacagggcatttatctggtagctaccgtgaaagactacaacaaccacatcgttccagttggactcgcgctggtttcacaagaggacaaggccaattggatttggttcctgggagcattcaaggaggcagttgactgggaaaagttcacgatattgtcggatagacaaaaaggtctgcttccagctgtcgcggcaattttcccaaacgctggccatcgatactgcctgcggcatatcatggacaacattaacaggaaatgttccaggttgttccaggaagaccgtgcgtgggtatgccgaatggcacgcagcgactgtgaaaatgactataagctgtatcgaagtgaactcgccgtgaacaaccctgccgctgcgaattttctggacggaatcgaacgtgctcactgggtgaagtacagtttccaagaaaagtttaatctcccgactttcgacgaaataccctcaaatttgtcagagcaagcgaacaactggatgggtaaagagcttcggaccgccaaacccttggacggattccacttgtacttcttgaagctgagtctactgatgtccaaaaggcgacaattgattgtaacgtggacaaaatctggcgcactctcggatttagtccccaagttgttagagcgacgtacagaccgccaatctgcagctgatatctgcgagtttacaccccttctcaagggtgcgtacagcgtcttgttcaagggccctgttgccataccaggatatgtgcacctagaccgggtagtggatttgccagcgctggagtgcacgtgcggcaattggcaagaccaaatgttccgttgtgtccacgcaatttgcgctgcttcaaaggatggccgacgaatcgaagacttgtatgacgccaagcgtatgtcgatcgagcacttccgcggtacgtacacattcaaatttctcccttggccgacaacagcaaccttacagcgggacgacactattcttcctccacaacttgaacccactcctgaacggattggtaaaagagggttgaagccggggaagaggccacaacacaagcgaaagattgtgaaaaacccgctgtagggacaagaataagcttcgtcgggcaaagccaatttatactttatcgatctgtatttttgacaaacaacacttcataattaatagatattgtgctttccgacaattctaaccaaatatgcaagtgttgctgagtcatatttgggtaaggtatattaaaaatctaaaccgatagatctctagtgttgtgctctaaaaacacgcgagtaaaatatttcgtgaaaatctcttaaactctagaaggagtaggaactctacgaatgtaccactccatggtacaccctttttgtataatttaagctgcaatggtgcaatatgctaccttgatctgcaatctgaattttgcaatttaactacgttaaatttagccaaatcacaacctgacctccgggctgaagtctactgtatttattttaaggcaacacttagaatagaaatagactgcgaactacattttcagcgcttcggcaagccccattctgctttgtgctcaatgccacgccttaacccacgacagcgccacgcccggaacatccagcgccgcctggacggctcgttttaccgtctcggactgaatcccggtatttccgctcatgacgtcagcgacgaagacaccgacgagcaggaagatgaagaatcatcagtcgggggtggactccgagaagaacgacgtaggggtggtggcctcttcgcaagcaatcgaagggcccagagaggcgtggatgggcagctatatgaggtagagcgaatatacgcgaaaaggtggattaacgtaagagtatattatctcattcaatgggttgggtaccgggagcttacatgggaaccgggaagccacgttccgatgcgcctgaagctacggttcgaacgcgaatcgatcgacttcatctgggtctaccaatcgacaagagggagacgtcggactcgccatcgacgaccgacacgacgcagcgcaaggatccagtctcgcagaagtaggtagatacgtcttgataaatacgcatcacgaacttagcaaatactgtgacagtagtttgtttttcggtcggcctggggggcgatccagtacttttctactggatcatggtaatccctcgttcggcgccatactgtgctatttataaattagcaagcaagcagctgggttggttaggcttgaagcctcgcttcaagtgccaatctaccgtagcagtgtatctacgatgttgaggtcgtccgagcagacaaaccatttcagcggcgatgcctttgactaccagtacaacaagagctatgcatgtttgacctgataaaagatgtggtatactattacattgaataggacggtaatacttggacagtgttgatttgacgtcactgcactgcacgagcagattagcagaggacggatgtgcttcagccctcgcttcaactcctcgcccactaagtgcttcttaccgctttttcgcgctcgaaacagacaaaccgtggtggtggaagcgattcccctcctttgtcatctccacagtactatagtagtatactatgatagtatactagtgcccgccggcgtgtgcgacatgtgcgacatatcataggtctggcacgcgaggattggcccaaaacaggtcgcagattggccaatcagtggcgtaccttcactttcggcgccctttcccagcaggcccatacaaacacgccgtgtaaaccagcattcagcgaaaatctcgatcttccgacctttttgcaacttttgcatctcttgttgcactttttgaggatgcaccagatggcttaacaagcaaagcttgtcggctgagcgccctgccaccaagtccagcagcgtctggacgcgcggcggctgaggcagccacccagcgcggggtaaatcggtcctcatatctccctcgcgcgcggcctggccggcccaatctgcggccttggctggtgggcaggtgatcgcgctaaactactgggccccagtatgggtcgtcggagacggtaaagacatggcgactgcttggcccggggggatgcgcccgaattcggtgtggtactgcgtgccttttgtgactgtatccgatcatgagccaatgagaggagagtttctgggatttctccggtggcggtagcccgcacaaaggtgcgaaaagtgtaggtcgaagcggatccaagttgaagccgccgtgttgggctccccgagatcggtcgagcttcggcgagtcttgcagcgctttgccaagcttggcgccgctgctctcgcatgctctcttggcttgcgatgctgcagcaagcagccccaccaataatttcagggaaacgctcgggcgtttccaccgcgggcgtgagcatggggtgacgacaaatttcactggtgctgagagtgagcaatgcacacggaatgcaaacagaggaggaccacgcgaatttaacacgcagttactgtggcgttttttcagcagctgggccggagagtgccgttgctactgctctttgcactgctgctgctgctgctcttgctggacagcaaataggctcaaaaccgagagcgcagcgagccaagagctcgctgcaaagcgacttctgtatactttatcatgcccttgtcgtgcaggtacggcggcgtcgctgcctgaatcaacactgtgtacttgtcgttttgctgcgacgtactaacatcgatttctccgcgcgaccacttcaacgagttaggcgcaaaactagcaaaaagtatcttttcggtgcctcgtctcactaaaacaaatggctattgctggccctgctcggcgagctccttggccagcgccacgtagtccacgtctttcctcgcgcgcttgctcctgggccgcacgaggggctctgcagcgtcggccttggcgcgcttcttcgcttgcagcatcgtcacggctggggtcgctgccggggcgaggtacttagccagcagcgcctgctcgtgcttggcctctttcgcgatctcctcctcgtcccagggctcctgcgccgggttgatgagcgcccgcgtatgcgccgcgacactgcgcgcgaagggcgagaccatgcggccgtggaaattgtagccgccttccagcaccgagatcagccggccgtcgcagcacgtgttagcgatctgctttacgtggcccacgagccactcgtagtcctgctccagcagcgaaacgtacccccagttcacgagctccttcttgtgggcgtcgaagccggccgacaggaaaatgaggtccgggttgaattcacgcaacttgggcaagatgcgatcccggagcgcgctgcgccatttcaggcgcgaggcggaggacccctcgcggcagaattccaagccttcgtcccaaatgacaggagattctttcacgcttgagacgcccgagccaggatagaaccacccctgaacttgaccctttgccagctcctccttgttctcggggtccttgtgcccgtagccgtgcacagagcaaaagaaaacgttctccgcgtcgtcgtcattgcgccagggtttgtactggtggacaacctgcttccctgtgccgtaaggtgtctcgaaggcgatctctttcgtggatggcacaagctgccggacgatctcctccgtgccgttgccatggtgcacatcgaaatccagaatggccaccttgttgaccccgcgatgcttcaggtgcgcgcgagcatacgctgcgccaacggcaacgttgttgaatagacagaagccgaggctcccctctgggtcgttctcacacacgaccttgcccaccggcccggcatgatgccctggtggtcgtacgatacagaacgcattcctgcacttgcccgccacgacctcgtctaccgccttgcacactgctccggcagcacgggcggccgcgtcatatgaacggaccgacaaagccgtatccaaatctaacgagaacgtggcgtggcactcctcaacatcgtcgccaccatcattaggcgcgcgcttcggctggcccggaaactggtggtggcctgtaccgtcgttcttagacacgaccggtgtcttgcccactacggacgcagcaagaggcgcgcacttctggcgcaggcgattgacgtagtggaattcgtgcacgcgcagaatgtcggcgatgtctgcgcgctcgatttcatggtcccacttcacattcggtcgctggaactcacgagaccacaggataccgaacaccggatccacgagcgtgtcgattcgctcggggttttcgggtggggggtctggcccgcctcgacgatgataagccatgggcaaatgccgccacacctcagggtggaaaaagaaccgagtctggtctccttgtgccacgtccactgggtgatcggcagcctcttcgacgcctttcccttcttctgctgcaagcaaacgtgcctcaagcgcagcgaagccgcacctgcgagcaacgtgggctgccgtgcacccatgcgagtcctcgagcgagaagttggctgctccacttcgaggagaattgcgcagaatctccacgccttcagcgaactctgcaagtgccgcaatatgcgccggcgtctgctgcagaggcgtcaccgggttcacgttcacgcaatactcgttcaccagcctcctggcggcgccagcagctcggtacttcatggcctcgtgcagcggccggaatcccaccttgctgcccttctccagcagcgtctcgagtgcaagcggcttcttcttcctggccccatcaggctcaggagcactcttgtcttccgcttccaaggcagacaactgccgcttgtagaacgccgccagcacgtccagacacttgacgaggtcgtagcgtgcgcacaggtggaagaccgtgttgccctcctcgtccctcgccgccaccttctcgaacagcagcgcgcgcacgtcctcgccgtagaaatcctgaccagtcgcctcctgctccctcttggcgaacagctcgtcgatcagagcctcgctgaacgcggcgttgatggccccgacccgcagcaccaggtgcaggaagggcgtgccgaagtcgccgcccttcagccgcagcatggcgctcgtgagcgccggcgagtagcgcagcaggtgcagcgcgcagtccgtctgctggtggatcgcggccacgtgcaggggcaggaaacccatgtcgtccttctccagcagactcgtctcgctcgacagcacgctcaggcgcggcggcggctccgcgcactcggacggcagcggcagcagcgagcgcagccggtccacgcggccctgctccgccaggttgtgcagcaggtacgcgtcctcctcctcgtcgttgtagtcgccgtcctcgtccggggccgccgcgtacggcggagccgcagcttctgcttgggagctctcggccatttggtcgcaattgggaatttgacgaaaatgcgccaatgagcgggcgcgaaaggaccggacactcgcttcaacgtcgcgagcggcaacttgcccccgcgctcggagttggttctgagtggagcagcaaagacacctcagcggcgagtattacattggagttagctcatgggagcagcttacgcagccttgttgtggtgcaaagggcaaagggggggggggggggggaagtatgtcagcagtgaactcgtgcgtcgcgatggcagcggtagctggtttacagtaacaatgcggcgttgctctactgcactagctgcgatgaccttgctctacgatagtgaggtaagcttacagcggcagcagtttgctcgttgctgcaccgagtatgtactgaccaagacgagatgtgattggtcgtgcacttcaacatgtatcataacggatgaaggcttgccacgctcaatctcgatgtattacgcggaacatgcagcagcgatataagttgtctgctcaatgattccttggcgtcgggggcgaagctcaaattcgacaccctactgtgtgtgcccaagctagtcaagcactaacgtaccaagattgctggcaagaacaatacatcaaacccctcggaagtggcatcaagtccccaggaacaacgttcaccatacggatcaggcagctactaatgtatgcatgcccggggctctcgatggtcagtggttaacatgggcagaggttctcttcaccagtaccatgcctctcgtactcaagcaactcgttgaacagggcgaggtcacaccacggaaactaaaaaggcaccaccagacgaaacgaaaaggatcctgtatccacggtcacagcctgcgatcacttcccacctcctggtctccctgcgagttgcagggagaccaggaggtgggaagtgatcggtcagcaggcttggctcgtggatgttttagtgcgcaagttgcagctcgaactggggtacagtatccacttgacatgactgctcactacacattttaattattgctggccgcgtcgcagcagtgtcggcggccgacgagttcgtgcccacgacaggttagccacttggacttggtgggctgtcgtcgcgcaggctcgaatttgctggcgttgctggcattttgttgttgctaatgctgaggctgcgggccatttagacacagcaccttgagtacatcacaagagtcgagcatgtaaggttacaggttgacggacgacgtttgcccgccatgatcacgctccgaggcgcggcggcagcactgagcgggagtcatcgtgtcgaccattatatgcgcgctcggcgtcctggtccgctggatcttcggcaggcaggcttcttgtcgcaaggagcaacgtgccgatcctgatacacgagcgggccccagctcaatgccgagtcggcattgccgacaccaagcatgtcctgctcaacgcagtaaaatgcaaaatgggcctggaagctagtccccagcggctgcattaattcgagtgtgctaagtggcgacgtgctgctgcggtggtgagccacgcacgcggttgaagtgcctgcaggctgcaggtcgcacgcacgcaaatacccgatacttaagtacattataatctccaacgcatacttattatctcgttgataatctccattttaatccatccagctcttaattaaaacctaggtatgatttttatatttcgccagtgcaggtctgagttttcgggcctaaaagcggcctccaccaaagcacaaggctaaaacagccctcgcctatctcgtgtccactcctattaagatccaggcgtggtcgattttagagggcaaaccatttgcaagggcaggattttcgaggagagctcgggaacgcaaatccagcagctggtgtgggtgacggtacagtgtaccgctctttcgagcgggcgacgcccgtttttctgacgggcatttaggaaggcagagagaagaccggacgctcgctcagccggcgccgtcgccacttgctccttccatccaccggcgccctcgctcgcgccgtggccccttcctccattcatggacgtgggcgcgccgcagcaccaggacgcgtaccaccagctgcagacgtcgcgcgcgcagcccccgcccgccagctccgtgcacaccggcaacacgctcggcagcgccgccaacaccgcgtccgcctcggcgccgctcgacaccagctcccgcaacacagcggccatggcgctgcgaggcccgcccgacccggccgtggccagcaagcgcgaggccgagtcggccgacttccgcgtcgtgacgctgccggccacgcaccggcagcaggccggccccgagggggccaacgcgccgaccgagttctgctccaacgtggtgatcacgtccaagtacacgacgtggaacttcctgccgctcttcatgctcgagagcttccgcaagctggccaacgcctacttcctgctcgtgtccatcctgcagtgcatccgcagcatcagtaacaccaacggcctgccctccaacctgcccgtgctcgtgttcatcctggccgtggacggcgtgctggccatcatcgaggaccgccggcgccacctggccgacaaggaggccaactcggcccagtgccacgtgctcaaggagacgttcaccggcaccagcgacgcgctcaaccgcgccggcggcgtggacgacccggacatcgcgctcatgcactgggccgcgctcaccgtcggctccgtggtcaagctgcacaaccgagagacggcccccgccgacctgctcatcctggccgtggccgagcccaaccccagcgaaccggccggcatctgctacgtggagaccaagagtctggacggcgagaccaacctcaagctgcgtcacgcctgcgacgccacgttgcacgtgcgcactgcggcgcaggtggcggcactcgacggccagctgcgctgtgaaaaccccaacaaggccatcggccgcttcgacggcacgctgtccgtcacagaaggctcgaaagccgccgactcgcacccgcagcccatcgctatcaagaacgtcctgctgcgtggctgccaactgcgcaacacggactggatctacggactcgtggtgaacacgggcccggacacgaagatcatgcagagcgccacggccacgcggcccaagtggagctccatcaacgagacggtgaacaagatgatcatctggctgttcctgctgctctgtttcctgtgcatcatcgccacgaccgtgcaggtgatctggctcaacagcaacatcgaggagagctggtacctggactggtcgcccagcatgacgagccagtggttcatcggtttcggctactacttcctgctcatgtaccagatgatccccgtgtcgctgtacgtgaccatttccatggtcatgttcatccaggccattttcatgacgtgggacctcgacatgtactacgaggaagcggatgtgcgcatgatcgtgcgttccatgggactgaatgaggaactgggccagatttcgtatgtgtttagcgacaagacgggtacgctcacgtgcaacgtcatggaattccgtaagtgctccatcaacggcgtgtcctatggcacgggcacgacggagattggccgcgctgcgctgcgccgtaagggtgtgatagtgccagcagagacggagccggacccggcctcacgccgcgccaagatcccctacgtcaactttgaggacccgcggttgtttaacattctggaacggcctatcaatgacgacacgccgaaccgtgaggccgagtttttcctgcacctgagtctgtgccagactgtgatcccggagacggtggagggcagctcggaggtgcgtttctcggcctcttcacccgatgagcaggcgctggtgtcgggagccaagttcatgggcttcagtttcgagtctcgcggtctgggtgttgctcgtgtccgcgtaaagcgtccggagcttgttcgccgctacgctaacggtgcgacaggctccaacgtactgctcgagttcaagattctggatgtgttggagttcacgagcgaccgtaagcgcatgtcggtcgtggtgcagtaccccaacggtgagtactgggtgctcactaagggcgctgacaacatcatttaccccatgctggcgaaggacaagagcgaccccgaaatgatgaaggacacgatgcgtcatttggagacgttcggcgacgatggtttgcgtacgctcacaatcgcccagcggcgtgtggacgagaaggagtacctcaactggagcgcgcgctttaaggaggccaattcgtcgctggaagagattgacaagcgcaagaacggactgcccaatgagatcgacaagctgatgacggaaatcgagcgtgatctggagctgctgggtgcgacggctattgaggacaaactacagaataatgtgcccagctgcattgccaacctgatgcgtgctggcatgcgcgtctggatgctcaccggtgacaagcaggagactgccatcaacatttcctacgcctgccagcttatggacaatgacatgcagcagtttatcttcaactgcgatctgtatcccacaaaggatgctatctattcgcacttgacggatgcgaacgcgcaggtacagcggggcagtggtcgccacgctgttgtgatcgacggcgaatgtttggagttgacacttgcagatgagcgatgccagagcgaattcctgtcgctggccatggcctgtgaagccgtagtgtgttgccgtgtgtctcctagtcagaaggctgaaatggtgacgttggttcgcactgctaacaagaaggtgcggacgttggcgattggagacggtgcaaacgatgtggctatgatccagcgcgcacacgttggtgtcggtatctcgggacaggaaggcatgcaggctgtgaactcgagtgactacgctatcggccagttctacttcctggagaagctgctgctgcaccacggccgcttgaattacaagcgcatgtcgattctcgcgggctacatgttctacaagaatatcgtaatggtgctggcgcagtacttctatatgttctgcacgggatcttcaggccagaagttctacggtgagttgggtttccagctgtacaacatttgctacacttcgctgcccatcattgtgcttggagttttcgactacgatgtgcctttcgaagtcagcaagcacttccccgaactgtacctggttggcccgcgcatggagttgttcaacaactacaccttcttcaagtggatctgtagcgccgtgtacgagtcggcggttatctttgtgttcgtggtgtacgcgttcaacgaaaacctttcgaacgccggcagcgcacccatggtgcagtacggattgctggcattcacgatggtggtattggtggcaaacatcaagctgtgcttgctgcagatgtcctggagcgtctacggtgccgcgtgttggttcgttggtgtcatcgcgtatctcccgctcacgcccatcatctcgagctactggatttccatgttcacgacggagtacggcagcttccagaacactttggggcaggagacgtactggctggtacttccgatctgtctggccgtctcgctgcttcgtcactttacgtggacggctgtctgccgccggttctacccgcagccgtggcagattgttcaggagcaacacgtgcttcaccaaggcaagagccagtatgaccagcgccccacgtctcgcatcgacatggaagctggcatccccgttgtcaacggcatggctgacaccgcctacatcaactcgtcatctccaagccacggctaccatgcggtaagcgttgctctctctaaatatttcgctcactcaatcatggcctctgacattgttctttgacatttaacagcaacactcgaacgagtatgcacaggcacaggctcagttcgctggcaagacacgaggatctggcagcggattcgccttcagctacgacccacagacgtctctggccgagtcgtacatgtcgacgcacgacgttcgtcaatccgcttcagccatgcacgaggctgaacaccgcggcaggaggtctcgcgaagactcacgagcgtccgactacgagtcgtctcgctcggcggctgtcgtggactcgacgaagggctcctcgtctacggggctattcgtctagctgcagcagccagaaggtttagttacactatcatcaccgacgtgcgtacactctacatacagaggagctccgcgacgccaagatcaagcaagctcagggtgtgaagccgaagatccgatcgtcgtgattgctcgagattttacttttgtttttgcgtgttttaagcagcttcaggattggggtcgtaaggaagttggagagccgtttagagaagcaggcggcctgcgctgtcgacggcagggcatgcacatatcaacagcgactagcgagtctaatgatcgtcttcacaaaggtctcgaattctcctgcaaccattaaatctatctacttcaatgctaccacagcgccatcacgacagcgcctacaagcagtgtggctgttgctgaagttactgccgagtcatgcgagacggcagcgcttgactcggcagtcacgttcggcggcaccgtgttgatcgagttgatggcggaggtgccatcgctctccttcccagacccggcctggctggcatgcggcggctcgtagttccagtccacgagcgacgccggacgcgagaagctgcagccgtccgcgtatttcatcgacacgtggagacacgcatcggagaaggaggcgctcatagcgtccacgatggagctgggcaggaagtcctggaccactgggaacacatcagagccgctgacgcacttgccagctccgaagagagactggaggtcgacgccgtacgactcggagctgttggcagcaagcggtagaccgttgacccacgtcgcaatgcggtccagcgccaccacgcagccgctggccgtgtactggtcgctcgacactgtggccactgcgttgccgtccgagtcttcgtaggcctctccctcggccttgaggcaggcctggtctgtgggcacgcgcagatcttccagcagcgctgtagcgcggtctgtagacgtggtgttggccagctcgcccgcgctctgcaggaacgtatagccgcagcgctgcgagctcgtgccattaaacgccggcgtctgcgtggcgcagaagacgtcgcccaggagctgcgccatcttggagtactggcccgtgatcgtgtagtcaaaaagcgagacgctctcggtctcccacgcggcgcagcagccgccggccgacgtggagcgcaacgtggccagcgacggcagcagctgcgaccgcagacacggcacgaagccgtccacgtacagcgagcacatctgctccacttccccctcgtccacgagccccaggccttcgatgaaggtgtccaaggcgccgttctcgttgtcgctggtgctcagcgacacggacaagttgccgagcgcgttctgcaccagcggcacgttgagcatggccagcgcgttggcgcacgtgtcgacggccgtgctggcggccagcacctcgcccagcgccgtgccgttcatgttggccaggcacgagctgccggcgtccgagatgaggaacttgctggccgccgagtggcccagcagccccacgagcaggtcggcccactggtctccgatgacggcgcgcaggggctcgagcacgggcggcgagctgtccgagagcgtggaggagcacgcggagacgagacgcgtttcggccgagacgccgcggggcagcgcgagcgacagcagagccgctggcagcagcgccgccgtccgcatggctcgaattgaagaggcagtcggccgattagtgcctgcgactggagatcagcagatggagtgacttgcaagtcaagcgtgacgcaaagagttcagcacgcacgaacctaagtcaaacttaagcgatacttagagcgcacataagacgaacatcgaaaagtagtcggaccaacgttaggatatgattgctacattcaacacttaacacttccttcaacgttgatctgcagctcaatagccgtttggacaagacctcatgaagcagataaacactaggcgctaatatattatggcacttcgtgtgcggcaaaccactgcagctggtggatcgcttgttatttacgatcctgcagtttaagaccgcctggaggccgttgcttctccaagcgagttcttcgctcatggatctagaaatgtcaaccgattgatggctctgtactagtcttcaagaaccgttcgcctcccgggcagcgaaagatctgctcgcggccatttcggaatcgcgcgagctctccatcaatcacccgaagacagccaacgaccaggttgctgagaccatggaggaaggtcagttgccgtcatcttcgtcctctcgccctccggcgggtatcgtgtgctacctgccgaatggagatttctacgtacaagcctgtcctccgggcggcatcttgtgtccgaagccgcgcgtgtcgccgggtctggacgctgctgcagcggagcaccggaatggctctggcctgctggatgccgttgatctcatggactcaagcgacgacgaagaagacggcgacaacgatgatgacgaagatctcccagaggcgacagctaacgcgcaactcgacggctcagcgctgctggatgcagtggacgcgattgactcggatgacaacgttgaagagatcgccgatacctctgggcgccaagagatcacatcgccgtcgcgactgcaggacgcggtggaatcggacgatgaagagcagctcaaagcgcggagcaatcctccaggacggacgacgacgttcatgtcgggggcagcgctggacttgtgcccgaccgtggacttgacgaacttgtccgacacagattcgtcttcctcttcttgcttttcttcttccgaggaagaagacgagtctggcgacagcgatagcgatgtggacttcgaagctgacggagagggatctgacgacgagttggttgacaagcgcacggccgcggtgagcgctcctcgcttgtcgtcgtgggagagcgactacttacccgtgagccaggtagacgccatcatccgctcgaacatggcggagatcgaggccaagaagccctggcggttcgtgttccgctgccttgaaatcccctttcagttcaagcggcgagacgacccgttcgacctcttcttcctgcgctgggacgagttctggcgcgtgcacggtcgagccgtgtgggagcgcgatttctggcagccattggtgcccgggtcgaccgagtatcaccgccgaaaggggcgccagttccgggctcaacgcgctttccgagagctggcaacggacctggaggagcgacttgggaggcacttccgcccgtggctcgccaagacgccgcacgatggctggtggtatcgcgtcaagccgtttgcgctgcgcaggttgttcctcaagagccgccgcatgtatgccgggtacttggaggatcgagtgaaggaccgctggccccgaggtcgaaggttcctggtcgatggaggactcaagccgatgtggtggctttccgacttcggtgcatctgcaacagacgagttgtagctgcaagtcggcacgctatgacagcgaaggtcttagccgagagagatactaacttacatgtactaccgcattctgcgagaaaaaaataagttaatcagcaagttgtcggtcgaatgaagcgaatagttttcaatcgtattgttggtatgctagcggtctacagcaatacaatgagccaagacgaacaccacacgaagtgatagaaccaagttgcgtgtttgaccactagcttaagacttaataatgcagagacacaccgcttcccattacagcggtcgaaagggacgcccccttagttgggcgtttggacggcctcgaaagcgagggacttctccgtgcggtcgtcgtcgtcatacaactcgacgttcttgccgcggggctcgtagccgaagaagagcacaatggccgagatgaccatgagcaggccaccaaagacccacatgatggcctcgagcgacacgttccagtcgccgaacatggacgcacacaggtacgggccgctgaaggacccgatgcggctgaagcccgacgggtaggccgcgcctatgccgcggatggccgtcgggtagttctccggggtgtacgcgtacacgcagccccacgctcccagcatgaagaaggacgtgaacgagccggtcaccatgacgggcaccttcgaggcgtccacgtagcccatggcgatggcggatgcgaacgaaccggccaggaagatcacgagcgtttgcttgcggccgatgatctcgacgagcccagcggccgcgaagtagcccggcagctggaacgccgtgatgatgaggatggtctcccactggccgttcatgttgtagcccttgagcgcgatcaggttgggcaggtagatgaagatggcgtagtacgacatggagatgccgaaccacagcgtccacagcaccgtggtgcgcacgcggaactggcgctggaagagcacgccgatgcgcttgaagtgcgactccggcagctggggcggcgcgggcggcagcggctcggcgctctccagctccgacttggggtcgtacgggtccaggccgtgggcgcgctcgatggactctacgatggccacggcctcgtcgtagcgtccgacgctggccagccacttgggcgactccgggatgtacaggcggatgaccatggcgtagacgacgggcgcgcagcagatgaagaaggtctcgcgccagccgatgcgcggcgcggcgccgaaggccatgacgacggccatcatgcagccgatggcccagaaggactcgagcagcacgatgatcttgccgcgcgtcttcttgggggacagctcctgcacgagcgtggaggccacgggcagctcgccgccgaggccgatgcccgagatgatgcgcgcgcacgtgatggaggtgacgtcccagctggcggcgcagagcgcgagccccacgaggaagatgacgagcgtgaccatgaacatggggcggcggccgtacttgtcggccagcgagccgaacgggaacgagccgatgaaggagccgacgaagacggcgccgcccaggaacgaggcctggcgcgagctctgcgggatgtcctcgcggatgagcgcggcgcagtacgtgaagatgaacgtctccatcgagtccatggcccagccgaagcccgtgagcaggatgagcttgatgtagtaccacgagagccccatgacgacgcccgagtcgcgctcgccgatagcgtcgatgcgccgcgtgatgcgctgcacggcctccacgttgtcggcgggggcggcggcggtcatgatcgggcttgacttgtgacttgacttgacttggttgctcctggcgaaaaagtgtaggttcttgtcgccctctgcttgcgatacacgacgaaaattggcgagtgagacgcgtccattgatcgcgatacctcttttagcgtggtttgtatgatagcctatcattgataggtgcggcccgcatcggtttggaaagggttcgcgcgttgattggtggaaggaggcttaccgaaaccgacgtgcgtgcgcgatccacgcggggcaaaaatcgtcttggcgtccatttgtaatcgcagagagcggcgtgcaactcgaagacgtggactgtactcctcctactttaccgcagaaaggtgagctgcagcctgttgtcacgtggggtccggtacgggcaggttgctctagatggtcgccaccgccatcatccagtggtttaagatgcattagttttttcttcacgcaagtcgaacattgtcgaatatgaccaatatatggaagaaattgcgcaaaaccttcccaaaaaccaaaagtcgctaaacctccaactgactctatgtaacggggtacaatcaagtgtacccattacatgaagagtgacgggtgtcactctcccgagtacatggtacatggtaccagtagctccgcaagccaaccatttgagtttgtgtgggcttttgtatagttaacttgtagtttgtattacgaccaagttaacctctaccaaaatacagtcagtcttataacctactcctttgtagcaaaccgtttcctttgaggccgggaactggtgaactgctgttcacctggatagtaatatccacacgcacttcctctgtgcattgtgctgtgtgaccccgtcacactctaagcttgcactgttgttgcagcggggctgctgtagctttagcgtcagaggaagacgtaacagactcacagagtctcagcttaacccttctagccccaaccttattctgtagcgattatacagaataagatgacttgattaaagtaattgtcaaaactgcaggaggtgactcgcgttacagcacctttaatacaacgtcacgacacctccatggagcgcctttaacccttctagccccagaccttattctgtatcctacagaataagcattagacttgattaaagtatacttcaaaacctgtcaaagatttgctgttggaagccctttcgcatcttgcggtcaagcgctgggtacattgtgcacagaatagctacgaaagtgaacaaaacatgctcaatgtatctaccatatgccgaaatggcgagcttctattggtcgtggcgagcgtagagcacgctcaaaacctgctacatggtaataccttgcaaggctgctaatgcagcatacttcggctccagccacccatcttcggcacgtcgcgataaacgcggaggaagaaatcgccctgttcctaactgacgtagtgaggaggaactgggcgaattcttccttgtgcttgacattagcgcatcattagatttctttagcccacctaacaagcttgttacgattgtctctctaacaacaccagggagcttgcatgctcaatagcccgtaatgacacgcactacacacggttcctcttgtacgaaacaggacaatatatgatattcatgccaacgtctacttcttcctttacatgcgcacgctcttcaatgttcgcgccagccgtgggtcatcttcgccattttggcagcctccgctttgctctgtagcctccggcactgccgctccattcctgctgctttcatcggtagcctccgtcgtagcctctatcccttcttctgtaatctccggtgtaatctcatcacgcggagagcttcttctgtagcatccgccgtagcatctaccgcttcttctgtagtctccggtgtagccacaccatgaggagcgcttcttctgtagcctcttgagtagccgctgcatcagctacaatatagcggtagacccggctgtagccggcttcgtaggaaccgatgagattgtgcgctgactccgcaatcgatctgccaatcgggccacacgcgagagctcatagcgtcgtctgggtaggatcaccaggtctggtaatcaacatcgcaacgtagaatcaatataccactagtacaatgttacagagcaaagtacacgctctcgcttacctgtagatcacaatggcgctcatcatgatcgtcttcggcaatggtccttggccacttgggcgcgctcgacgggccccagcaaagcttgcattgcgacgtcttgaacagcgcagtttcggaatgaaggaaagtacgagtggctgacaggcggcggttttaggcttccacccgaattttcaaacctgttggtgatttatactcgtccgtctattaccgcggaataaaccccgtttatcttcccatcgctaatctaacaggaagatgtgcacaataccggctatacaaacatccatatgcgaagttcgaaagagaggacaagtttgctggatattatgccctgtgacaatgcttattctgtaggatacagaatacgggttagaggggttaacaggctaaagcgccattatgtacttcgtgatcattgattgtgtagatacagcgccattatacataaagcgccattaacatcacgcatgaggaatctaacgttcatttactcctacatgtccaggtttcctgccgtgcaatcaagccggtattagcgttcaagttgctggtcaagaagcgcgagggcaaggacaaggacaaacacatgagcggcgtctaggtctgccagatgccgcgcggcagcacgtgcaacctcgtatgcgtcctggagcaccggaaactgtcgtgcctgaggaagaaggtggcggaagctgcaggtcctggagaagacgcgcgtgccggtgctgcgtgaaagaagctgatggagcccaagggaggcagcagagcagtgggaagaaggcggcaggaagaagcgggtgaagggagagaacgtgttcgtcagcacgcagtcaggtcatctcgtatgcaagggcaacctgcgcctgcgcaggaatgctgctactcgttaagggcaagccgaacactgtgctcgagatcacggacccaagatgaagagctcaagaagtggtggctggactacactctgtccaaggacacatacacattattcttgcagctcacggtgaattggtgccctgctttgctcaggtgcaatggttgccatcggctgcatgacgccggtatcggatgccgtagtgaagtttacgggacgcacacgatcaagtagcaaggaaacgaggttgggctgaacgttgtctcctgcggcccgcgcgataactccgaagtaatagttaaagtgtactgcatctaccagcatttacattctgtcatgatcacggggtattatgccttttacgcgtgaatactcggtcgtacaactaacgtttggttgtgaggctgatcaaatactagaattcaccaaggagatttaggagcacagtgacaacgcgttatcatcttcaaaagcggcaaagtggactggaagccgcttatcctaccgcgatccatgacccgggatgatcttggatacacatcagagtcgccaaagtgcagccagcaggacacattgtaatttcatggtattctgctagacttctgcattcacaccgttgtagcgcttggaatgtaggggcacgtatcgtagtggtgttggcaggtagtgtaggaagctctaggacaaatgaatgatgatttattattgcgaggctctggatcctggttcactagcgctacgtccagtctaaaaccttgcacatgcactataaaagaaaagaaaagaaaataatgaccagcgtgagatcatgaccagctaagtagtcatgtcgaactgctgcagaatttccgtgtgcgtctcgaagcagcttgctgctcgctcagatggtggagacttttcccagcagtagtgcacaatgtaccacaagattcgtagtcgaagcagtgtcgtgtagtccgctggtacttcggaatggctgctaaaaccactcagttggttcagaatctcgtgcgcctgggcaattatcagtgcaccgcaactcgacgcatccgactgcttagctttcgtgagccactttttttcatctcgggggaatgccagcggtcagcggataggttcatgtgactggcgggtttcagttttccaacgagcgatctgcaaattgtagtcatcatgccactgcgtcaaaaagggaagcaagccctcttcccattcgtgctccagaagggtatcacgcccaccgggagggtcgtagaaatacactgtgattgccgagtcgtacttgatctgcgcgacgaccaacatccagtggaggtttgaagtgttgagtggtagaacaacatacttcattttggtgatgtcttcaacttgctgtgcattgtcgcgaggtgtatcgggccatgcaaccatatttaccagcatattcatcagcttgacgccgctgcgggcgtcacacaatgcctgaaggcacatcagaatcaccgagtcgttcaaccaccaatcgcgagctacaaaaccagccacattttcaaacttgatcgatcttgcctccgtctgcagtacgtattctgtctgaaagcaggccttccggtattttgcccttacttgtaccgcacattgtttgtctcatccgccttcggcttcacagtttccacttgattctagcgaaaagagctcgacttgggtagagcttttccaagcacgatgaagccactgaatgtccttctcccaggcacagagcttcgttttaagctgatagtagtgcgacaagcgaaagatcgcacgactaagcattaaccacacacaaacatatgaagctgttagagtttgaatccccgtaaaccatcgtgctgtaaggttgagtactaaccttgagaagcgtggaagtccgtctggatagcttaaaaccaaatcttggctgctcgaagctgtgttttcatggtgtccaggcactacaataagctagctacacttaccgaactcggacttgacccttgttggctttgggggaagactgtctttttattactgagttttctgaggccctggggcctcgttctggccatcctatgatgagtcctatgtccctatacaaatatttagtgtgaacgatcgcaataaggcgattccggacacatcaaatgagaccgcggctacactaataagtgcggccgaagtacgtaactaaatgcatctgtatctaaaagtgggtaccatgaagcctcgttcagggttgtattaggccccgacgaggcttctgccactatctgccactccaacgaggataatgtcgtcagcttaatcaaagcagccacttccatctcgcacttggctgctccttgactgtactttgattcttgggcgacgggcaatcgctccggtaatctccattttccgataccgcaaccgccccccgcctggatacgagcccccgcaacaggtgagcgtctaggcgcctcccgtccgtaaacgtcatggttcattcatcgcgcttgtgcttgaccgctgcgaccgccgctctcctggaccttcagtgttctggtccggtacgctgggcgctcttgctgctcttcgcgatcagttggatcctcgttaatgacgccagcttgttctccggcatcccagggtgctgtagatgtagtcaccgacactttgcaacgttggctagggtcgcaagatctttcattacccaccggtgggcctgttggcgctgataatacggttccggcgcaagctgcacctgtgaccgagcctccagcgacttccgtcgctgctgaagtgtcggtcgacacaccacaaggttcctccagtgatatttcatcttctgctagggccaccgaggatttgaggatgcttggagccgctacgttgcgcacggtgatacgcatgtccgatgcattccggtggtcgtatggtccgacgttggtcgttccaccgataccatgtggactgccggtgtttgcgtcttggtcccgtttacttcaccttcagtggcatcttctgcagcgtgtcaaactcaatcggaacggcgtacggtagccggtcatgcttcaatcggcagtccatccattgctacaccaccggaattccggtggtcgtatggtccgacgttggttgttcggtcgataccccgcgcactgcccctgagttacaccttggcttcgtttcctcgatgacattggtgtctgctttagaaagtgctgcatcacctgagggtcaaactgagcagcatgccatgccactcttctggcctcaataccaatctaccggagttccggtggtcgtatggtccgacgttccatcgacatgctgctgaccgccgctcgtcacacatggcccgcatacttctcagcgtcgctgacatcttctgtagctagttctgcgtcgttcgatggttcaacgtcaactgcagtagtcagggaacgtgagatgactcgtccagcctcacaccattactacgtcggaactttggtggtcgtaaaggaggcaggtatggttgccccagcttgaagctcgcgaatcactgcaccgccaacgtcggtcacatcatcacttgcttcgttatcactcagagatagtgtagctgtgtcgaccgtggtttcgttgccttcgttccacagttccatccggattttccggtggtcgtaaccaattcgggtttagttgcctcagtctgtggctcgggaaccaccgcaccagaaacgtcggtcgagccttcagcttcttcctctttggcgtgagaaactgtaccagtgttgaccgtggttcgtgatccacttacagcaaatactcggtggtcgtaacgtaaggtctgggtccatcaagcgacccgctgtgttgcaatcaatcttttcgagccgcaccaattctcgttcagggttcccacagtttccgcgcaggctacatcaggcaccaccgccttgaacgaaacgtagttgtcgggcgtagcggtcccagatccactcgtatctccacttcatcatcaaatccatacatcgtcgcaagtcgaggtccggcgcacaggcgcgaccttcttccacgttaatatcggcacccgaagcctcggtcacccttccttgagcttcattcctgttcgtttcatctgctggggtgttgaccgaggcattccgacatgccactccatcgtaactcattcacatcacatgtaatatgcaaattccagtaatttccttcgtctgtcgctgcgagctggatagccctcgcagacagttcaatcatcgtttccagtagcttcattcgtctgccatcgcgagctgggtaaccctcgcgggtagttcaaacgtcgttagcgtatgcaacttgtcaacgacttgggccacgtgcaaacatcgtgctgcgttcgccactcgtgcaggtcatcacccaaacgaacaatcgaacggtgttcgtctgcgcttaggtacgtcatctcaggtccgttccacttccaaacctttgccagcccaccactgagaatcagcactcgtgtcttggtttacctcgttccatgtagggccaaatccgagtggtaggcttcagtcgagaggtcggtagagactcctgcgcgtagtcgctgcgattaatctcgttcgcggtgtcatcatcctccgggaacccttccgcaaccatcgcatgtacgaccgaggtgtaattcgcctccaataggctttcagggtcctctttgtccgggccatcgacacaattttctccatcggtactaacctcggtcgtggcggttcctgcttcagttaaaatgtcgttcagtccaggatcatgttcaccccagtcgatagtggcgttgccccgcgcgaccgacgttttatctggttcagggcgtgcttgcgtgtcagtcgctgtttcggccatccgcggggcgggttccaccgctgctgttacatctggcgcgtcatggtcttctcccgaatcgtcgttcagctctccaacaccatcatcacgcttgactccggctcctgacacttcggccggggcttcctgtgccccatgttcgatgctataggcgttatgatcggtgcgcttggatgcataggccgctcggtgaagtgacgacccttccagtgcgtcggagccggtccatgcactcgcctcgtcgtccgaaccgtcgttggatataccatcacgttctgtgtcgtctgcaccaggctcagtaaccttgaccgagccttgggagaccctggggtcgttggcatgatccgatataccgagcgaagaataatcatcgttaggacgaccttgaagatgacctctcggccatattggagcgtcgcgcggcctccgtaagatcttctgcggcgtcgagtaagtcctgcgctcaaccgcgggtggctgtttggccagccattggtcatagagacatcgctcccttccatacagagtctcgtcacggctcgttgagtatgccagcacctgccactccttgtacttgttatagtctaatctcgcgtagccagtctctcgcggtagttcaccatgtggtacccacagcaccacggagtcatgcttggcgcactgtgccgctgtggtcgtaatattggtgagccgtacccacgtcggctacccccgtcgaaacctcgttacggtcggcacgagctttttccgtgcgtcgtacccacacatcgtactccgaacgaggtagccgctggcgcggcagtcgaaactctcgccactcgcgaccggggacgtataaatcctcggtcggcccacacgaaggctgcgtgccataaggttcgtcatcttcaacactctgcgactttagcagcggtaccatgacctcgtccggaaggcgtgcggtgccatgaaatagatccagccggattccagccgggatcataaagtccatcccaaagaccacatccactccggcactgtggtctattatccacaattcaaattcgtagacctgcttccacccgagagtgatcttgacgagcacccgtcgccgggtctccatcacccccgggttgatgccgcggacttcgagacttcgtccgtggtcccggacttctcgcatacgtagccgcttggcgaagctggcagaaatcacactaacattcgctccagcgtcaaggagtatcctcgttcgcgcgtcgttcacagcgccattgaccaaagctctcattcgcttcctcttgtcgtatcgttgggacgaccaccaccccagtctctcaccgggcagtaatttgaccgcccgaacgaggctccgaggtggtcccctgatctgggctagacttgtgatcaaagcctcggtcgggtgtccatcacgttcatcatcatcttcttcatcaataccaatctcaacgagacttgcgtctcgttctctccttttccgtcggtttcacacgttcattgttcttcaggtcgtcaggccgtttgctttcacccgtgaacacgaacagatagtccgcatcaacagcaggctcagctaactgtggcagcccgattgggaccaacccagtttcagttggcgggctgcctagttaaaatggcttccatacatcaggctttgcagctctagcgacagatccttcttgtcgaccttggacttcaggagcttggtgagctcgtggagagcttcacacttcccagtgtcgtgcacctggttgcacagtttgcaccgccggtagcagaagtgcaccaagtgggacgggcttccgcacgcggcacacggcccaaactggcgtcgaccatctcgttcacggttggacgggcctcctccgttcctgaagcgtcggttatcagaccgagcgaacgttgcttcggctgcggccctgcgctcagcatcgttagcggcagcgacatgtccggtagacccatccgagtcgtaatcagcgtctgaatcctcgtccgagcgttggtcgtccgagtattggcgctcatcctcgaagtaatccccgttcgcctcagcatcacgtcggggggcgtatggagcctcgttgcgtgcaccgaccgagcctccgacgttccattccgccataacatcggcaagggcgtcgaccaaagtcaccctcgaccggtgcggcgacccgtcacgtcggtcacggcggcggtcgtcatcacgacgatcggtgcggcggtcgtcgtcacggtaacgtcgttcgcggcggtcctcgtcgcggtaacgtcgttcacggcgataaccacttcgagaatcctcgttcgaccgcgcgtcgcgacagcgctgtcatcctgactgcgggagcggcggaacgatgattcgcgggtcgactttcggtcgcggtgacgcagaatggcgttgatcatgtcttcgaggtcatgaatgctcttgacccgaacgtgacacagacggtcttctatgtttcggtcatcacacgtaaccaagaagtgttccacatggtccttcgcgtcacgcccaccgttttcaaactgcacgccggcgttgcgagcgtagccgttaagccggttgaggtagtcacatacgtgctccttgtcctctcgcttggccgagtaataccgagccttcgcagactgggaaaacttcgaacagtagtacttaaggaacgcctcgctcagcaacttccacgagtgtctcgtcttgcgtgggagctggcggcaccagtgcagagctccatctctgagcttaagctcgaacggcatacaccactcgttgggtgaagcatgtgttcccttcatctcatagatgaacgttcggagccactgcatggagtactcgctcttgtcgcgcgtcccgaagaacggcttggtattggcgaggggtagatgcgtggcaatctcgagcttcggggttgagctctgattgtcagtcgcgcccagttcgcgcacctgacgagcccattcgcttggcaggtcgccctcgtagtggtcggacccgagatcgtcatcactgtccgacgagtcatctcggtggtcgtaacggtggctgggggcggccggttgccccgcgcgtgccggacatagcgtacgaagactcggtctccctagccagacgttcagtacggtccgtagatcgtggggtcaccatgtgcgagtcttgcatgtaaggcgaggcctcgcccttggctgcgaagactccgtcgtccgtggctgcctttccggggggtcgctggtagcggtacattggaggggtcgacagcttccggggtcgaatgaagcctcgttgagcctctatctgccactccataggcgtcgcgcaggttcttccttcacttggtaagtgccgcggcagtgcttgtgggcgtccagctcgcgagtgcagcctccgtcgggagagtctggggctcgcaccccattgcacacaggaggtccacagtgttctgagcgacctgccgagtgctcgttgagttgatcggcgttgccaaagcccctccgaggtccatccagatggcctggcggacctgcttcggggagaacaactgcatccactcacttttggccttcatcagctccagacatcggcctagaaccttgctggccgccggagtatcgccgttgaggggaggacgagtgccaaccggcttggaggttgcccctcctaccgtcaccgaggctttgaaaccctcggtcgcaccgtcatccgcgtcgtaggcgggctcggggcccgacatgtcgttgaacgtttcggagaggtcgcgggtgatcgacctcgagcctccactgcggtcggccgacacaaccgcggcctccgaagtctcggacatcacagtcctgacatcccagtcatcatcttcgtcatcttctttggcgtccgaggaatcaatcgccgtgtcgcatctcgccgaccgctcgtcgatcgactccatcctatccgtcgctggggtcgagaacgagcttccagagcgcaccgaagcctcgttgcgcgttccactcgacttgaccggcgttgctggtaccgctgacttgactcccttcgccttcttttcacttcttcttcgcttctcttcttcttctcctctttgctcggtggggtaagacctacaacaacccagacacacagaaggtcgcaccaatcccgggtcgcggcaccagttgtggtgtggtaataccactaaaattctcttctaccaaaaggtattagagacaccaacaacacgctaacccgcaaaggtaagcgcttattggatcaaaacctgaagaccaggaacgatcccttacaccgggtcggttgcaagcgcctctgtgcaccttaggttatcttcggtcaaccctaaaacctgtaccactagccacgagctaaggctaggatactatgtagcgctttcgcgcaatcccactgcagtccctcagaaaggaagggtaccggcgtgttgggccttatacagggggaccaaggtaaaacctcggtaggtagactaatacactcagggacactctaatcccacaaaacaaatatatactgaacgatactctaataccgttcctgcctctccagccacgccaactcttggcgctaccaaggaaactctcggtcaatgcacgataagctccccgacaggcatccacacgcagccgagcgtgtccaggcactacaataagctagctacacttaccgaactcggacttgacccttgttggctttgggggaagactgtctttttattactgagttttctgaggccctggggcctcgttctgtccatcctatgatgagtcctatgtccctatacaaatatttagtgtgaacgatcgcaataaggcgattccggacacatcaaatgagaccgcggctacactaataagtgcggccgaagtacgtaactaaatgcatctgtatctaaaagtgggtaccatgaagcctcgttcagggttgtattaggccccgacgaggcttctgccactatctgccactccaacgaggataatgtcgtcagcttaatcaaagcagccacttccatctcgcacttggctgctccttgactgtactttgattcttgggcgacgggcaatcgctccggtaatctccattttccgataccgcagagagatcaggctcgtcaggccgtgaccgccctggagcagcagcgtgccccggtcgacgaagagctccgtgcggcccgtgcgtcgctttctcagagccgcacggagactgaggcggcccagaacctgaacgtcccgctgcaggacgaccttcggcgcgccaacgcgctcttggtggcccacgccgaggagctccgccgcggcgcgacgcgtatccacgagctggaggagtcggtggcaacagccacgactctccgtgtggccgccgagtccgagatggcgcgggctcaagctgacaaactttgcgccacgtttcgcgcggtgcaatatcgggctgggtggctgtccatgcggcggtcgtctcagcagcgtcgagaagcagtcggcgcccagacccatcgtctcagcgctcgcgtcgtcgagctggaggaggagcgcgacttggccgtccgagagcgcgacgaacgcgctgtggtttggcgtcggatgcttcgagacgcgcgtcggggccgagagctggcgcggctggtgcgcgacgagcttgccgatcgcctcgccggtgtcgtaacgcgtgtaggcgggcagatcgacaccgctgacctggtcaggcgactcgaagccaccttcacggcggagatcgacggtgcggtccccctccccactgctattcctacgtccgcagcagttcctgtggcatccgcggttcctgttcctgctccaactgcgtcgagctctggtgcccgggcgggctcgtcggcttcgaaggcgggctcgacgactggcgcttcccctccagcaggtccttcgggatcccgtcccgttccgacttcgtccgctgcctcgtcctcgtaagattttcggcgacctcgacacagcgcgtcgagtcgttcgggttctcggtcacgcaaatctaggccgtcaggtgtggcgtccgctacgtcgtccggttcttcgccccttcgacgtagtcggcggccctctaccgtggccgacactgtggcttccgacaacgccgctgcgcaggcctcatctgccgctacgccctctgcggccgctgcagctgcagcgcgcgcacgagaggacgcgtcgctcttcggttccgagtcttcggacagcgaggaccaagcgcggcgagctcagcccaagcgtcgccggctgcatagccccgggtctcactcacggtcgcatgcgcgtccgcctccacgttcgcagtcacgttcccggacacccccgcgctcccgttctgcttcgcgttcgcgttcgcgctcggcccctcgttcgcgttcgcactcgtccccacgctcgcgctcgcgttctcgctcgccctccttggcgtcgacacactcggccggctcagcgcgttcggcgcactcggcggggtcggcgcattcggcggggtcggcggcctcgtgtcactcttctcctgcacggacgacgcactcctcgccgaggggccgtgcggcaaccggagctggaccaggccctggtccgggcgattcgggcgactccagtggagacgactcgtccgcttcctcgtcgtcccgcgcctcatcctcgagcaccacctccagcggctcggcggggagtgctccggcggcgcccttcttcgaccctgtgattccgcctgccggaactccgtctggctggcggcagcctcgctacgctccttggtccaagcgggtacgacgtctccgccttcatctcatcaccgtgcaggagttgcgaacgctcttcctgccgccgcccggctggatcattccgcgccgtgttccccccgcgcctgcgaactggaaccgcgccctcgtgactctggccaacgtcgacgcgcattacgcgactcggccgtggcgctacctcgctcaagccgctgaggcgcttctcttcgcgtccggcgacgcggcgttccgcccattcctacgtcggctccggcaccacatcgagcactgggctcaggcgtactgggaggccacccatgagctcttcgtgcaggacgcggcgtggaaaaggtggcgcacggctcgcaactcgcgtcgctcccacgcgggcaaccacctcaacagcctgttgcagctggtggtcgggctgttccagcaagagctcgcagacatggacctcttgctggatccaatggtgcttcactttccgcccgcgcacacgtcgatcggacggtggtatccaggcctccagcacgcgacgttgcaagccgcgctcgacgacatcgacgcgcaggagccctggcgtcggttctatcggacgccgctcactgtggccgagatggacgccaacgtacgctgccgagtgacacgcgatcaccccgccttccatgtgccgcgtcttgccggtaagttcgtccagcaggtttgagccctggcccatcgtcgtagttcgtcgcctttagttgtcgtagccgtaacttcaacacgcagccttgatcttttcccttgtttctttccacttctccacatcttttatgagacggccctccgccgtcccatcttcagcaacaggctggtcctcctcacttccctcatccaatccctcgctccggccattcccaaagtcgaggcttcccaccagtcctcccgtcggcagcccccctgccgacttagtcgcacccgtgggcgctcaccgaccaggctccaccgcctccgcgttctcgtgcgactgcatcgcctcgaaccggttgcgtcccgtgcgttggcgcaggaagccgtacagcaacccgccgcaattcagatcgagctcgtcgacccacgtcgtatccgggtagcccttccatttgacttcgaactcgcgtcgcgtgcgcccataccgggtagcccgcccctcgcgcacattcacgatcttctcgacctcgaagacgtcgtcctccagctcgcgcgtggcttcccagctatcctccggcaagagctcctcgtcgaagtcgaagcgctcctcggccggcaccgtcagctgcatcgcgggtcgcgacgggaattcccggacgggctttagcttggagatgtggacgacggggtacagctgatagggcgtacccgccgtctcgaggcgcacggcgaacgcgctgaccagcacggcgacgcggaagggtccgtgccacatgtgcgcgagtttgcgcgcataccccggcttcacccgatccaggtacagccaaacttgcgagcccgtcgcgatctcatggtgcgtcgcgttttcagtttgtcgacgcactctctcttcgacggcctcccggactaactccaacgcttgtgcccttgccaccttgtagtgtcgctggatacggagtctccaccgcctcgcctcggcgttccgagtcgacgtgttcccgacggccagcgtcgcttccagcgtcgaccgaggatcccagccgtgcactaagaagaacggggtttcgttcctcgtccggtcgggtcgacgtccgcgatgtacatcttgatcgctcttgtaaccgtctgcaccatccgttctgcagcaccgttggcttggggacgataagcgagcatcgctcgctgtctctgacccatgagtttgctgaacggatgcatcgctgctcaggtcccatggtcatggtgaccgatggccagcaaccttggcagcggctactgtcgctgctgggccgaagatggcgcgcgcattcgctgctggaaggctgcctctgtcaggcaaagacatggcagccagtctgcgacttggtccgcggacgatggtatgtgtacatacgcaacaccatgccgcagcgtgatgctgttgcaacactggacgcggtacgtctaccggccagatagccatcagcaccacgccaaagctccaggctgttgctacgctgggcgcggcacgtctgccggccaggtagctatcagtcccgagcatgggtgttgcccacgaggggagaacccgaacgtgttgcctttgcagacattcacagttggcgcggcacatgccgcacctgtaaggcgcgaagccatacgcgtgcacgtggcacatactacctgtgagatagtcgcggtgcgtgacgctcactgtgcgcgtggcacttggtgtacgcgaggtacccctagtgcacgcgacactacttgtgcacgtggcacttgaggtgcacgaggcacttatggcagtcgtggtacgcgccatacacgacgtgcctttggtgtatgaggtggtgccctcgtacaccttgaggtcctgtatgaactgtgtgccatgcggtcttgcacgcacacctacctggtgttggtcgccgcgacgcaggatgcgatcgccggtgacggagggcaatacaccccacaccacgatgaagtacccttgcggtaccctggtgtcgaaggaagacaccttagcgtcggcgacgtgatggccgtgacgcactgcagggctttagacaagtccgccgcgttgctctgtatgatgagcgggttgctggaagcagccttggtcgctcaagcaaacacgaagttgaagcatgacgcttcatggctgtggtcagcgcttgaccatagcccatgggtcgagccgacgtattcggccgaccggcacaccgtgctgtgacaaacggggccctgtcgggccgctgtcatggccggagatgagcagcacagctctctccatggttacgctatgcgctgaccggaaaggtgctgtccctcgcgggaggcactgtagcacgaacgtgccagcggggcccgagggccatgtgacgccaactgctggttgtctacgagggacaccgcaagtttggaggcacatgcatcccgtgccgaggcactctgcgcctgctagcgctgtgaatacggccactaaacgcgtcggcttcgcggccaacatcgccgagggcaggggggttccgcgcggggtgcccgctgcgggcacaagtcactgtgggcgtggcgatgaggcgcaccagccttgcggccttcattcgtcgctggaacgcgagtcgacgcgaagggcgtccgttcgtctcgtgactcgaagcgcgggaggagcgtcgaggcgagcactccatgacggatcttcgggagcgcatcggcagcatggaagagcgcgagtggcgtctctgctacgttcatcttgtcgaaggtgcgagaactgcgcagcgacccgtgatcggccgacgcgggatgaatgggagaaccaggtgcggacctggcctctttcggaagacgagcagcgctggatcggacgctacgagcgctcgcgctcggaggtggagcgagcacgcctacgccgtggacgtgagcgctctcgaagccgtgatcgtcaatacagtcacggccgaaaccaccgcgacccttcgccggagtttcgtcgcagccgcagtcgtgatcgagggtggccttcagctggggcgcgcgagtgcagtcgctcgcaaggacgcggttctccagcgcgtcatcgttcgtcttcgccagcgcgagtgtggactcattctcgcgcacaacatccgggatatcctgcagcaggcgactacgtggctcccacgtatcctccgctggcgaatatcccagccagcggacgcgatagtgcttctcaggggtacgcgcgtggcttctcttcggattcgacggcacagcactatcgcgaggaccttcctcgcgactccggcggacgtcatggtctacgatgcgctcggcaatccagcgccgatcgccagccgagttaatcagcgggggtggaccatcgcgacggtagggcggaacatgggggcgaaacgtcgcgcgtgacccttcggctcgaacagccgccggtttcgtcgctttcgtcggcctcgtcaactcatcagctacctgcgtgctcggatcctgctgcgtctgtgcagcgggtgacgatcgagcagttccgaataatgatggccgagacggagcaggcccggaacgacgcgctggacgcgcagaaccttgcggagagcgctcgcactcgagcgagcgcggccgaggcagtggcggaagagtctcagcgtgatcgacgcgcgctggtggagcgcctccgtcgtctggagagggctgcattcggggcaccgcaggcggaacagtctgcgcgtgagcgtcagggacttgggccaagctggcgtcagcgtcgacgccatgggggatcggactacgagcccgcccgtggcgctgcggacgggagtcggggacaacagcaggaagatacggcttgaggcgcccgacgtaaaacgtcgggtggagatgcatagcagtcggtatgtctagggtgtaggcgtctcccagcactttgataaccttgaatggaccgatgtatcttggcgccagcttgttcgcgccaaggttcgtaattgctgtcaattggattccggtggtcgacagcaggactcggtctcctttgcggaagacgctcgtgttcttccggcctcgctggtctgcgtactctttctgcttgtccacagcagactgcagcgcatcacgcacgaatctcgtgatggcttgacgacgcagcatgaactccgataccgctgcggagtcgatcggcgaagcagcttcgcgtggggcgaagttggccgccggtggcccggcagggtcagatgcgggcgcagggtcggtcgatcttctagccttcgaacgcgtccgtgatgcaattccacacacggcagccgttgacgtaaccggtaattccgcgcccatcggttctgctaccggtggaaccggcgccacagtgctgttgctattctctcacggctcggcttctctcgacactagtgccgggcggttcggctctgcatccatacccccccaccaagagtggagggcgccgaaccggacgaagacccgaaggcgagcgtcgctggaacgcgtggatgccgcacgttgttgatgaagaacggcgtcaaacctgtcgacgcatggactgcgttgttgatagcgaactcggcgagcggcaggaatgtactccacgacgggaacgacgtagcgtagctgcgaaggacatcttcaacgactcgattgacgcgctccgtttgcccatccgtttcaggatgagctgccgtcgacatgaacaagtgcgtaccaagccgttcaaacaatcgatcccaaaaggtcgacgtgaagcgagggtcgcggtcagagatgatggattccgggaggcgatgatgccgtaatacgaggtcgaggaacaaggacgcagtcgcctcagctgtcacttgggcttcgactggagcaagtcggaccatcttgctaaagcgatcgacgatgacaagggcgcccgtgcggccctggtcgtcggatggaaggccgaagacgaagtccatgctgacggatcgccacgccgccgtggcgataggcaacgggcgcagcggagcttgcgatgatggagctggcttgacgcgctggcaagtctcgcaagtccgaacccatttgcgaatccacttgtacatccgaggccaatagaagtcccttgagatcgccgcgaacgtcttctcgcggcccaagtggccgcccactggggcgtcatgatactcggggacgagacgagcatgaaggtcgtcatcggcggggatgacgacgcgcggaggatcgaagacgtccatcgtgtaggttagcaatgggccatcgagctggtatcgctcgatgtgactgcgcgtggagcgtgtcagcttcttcgatgagtctgcactcggagtacggaggtgcacaatgatgttgacgtagaatggatcgtgttcgtacgcatcagcaatctgctgacgtagtcacaggactggagtcgtaatcgtcgcattgatacccagagcgatgcaacattcgcaaccttcatcttcgtcatcgtcgtcagcaagttgctgaccgactagtcgtcgtgggtcgtagtctggtcggcgggacagcgcgtcggcaaggatgttgttcttgccggacttgtagtgcaccacgaaattgtattcggcgaagaacgagagccatcgcgccatgcgctgcgacaagtgtggagtcttcattgcggtgcgcagcgacgcgtggtccttgtccacggcaaacgtctgctctccgagcaagtacacccggaatttgatcagggcgtagcgcatagcgaggagctccttgtcgtggacggggtaattcttctcggcaggcttcatttgtcgtgactggtagctcacgacgcgttcgtgaccctcatcgtcgaactgcatcagcgcgcagccgattgcaaaatcactcgcgtcgcacacgacagggaacggtttcgtgtgatccggaagcatcaggatcggcgcttccgccaagctcttcttcacggaatcaaacgcagcttggtggtcgggggaccacagccacgtcgcgtcctttttcagcagcgaagacagcggttggatcaggccggcgtaattcttcgtgtacttgtggagataattcgccagacccagccactgacgcagctccgtggggttcttgggagtcggccaagaacagatcgaggtgaccttctccggatctgcgcgaacgccgtccttgcccacgtagcaaccgagtacgggaatctccggcgcacagaagacgcacttcttcaaattcgcgtacagcttgttctcgcgcatcacttggaatacctgcctcaagtgttgaagatggacctcgacagcgctgaggttgccctcagcgtggctgtgcacgaagatgtcgtcgaagtagctcggcgcaaagtcgcggtcgcagtacgtgagacaccatgcggttgaacgtggctggggcgttcttcagcccctgtggcattacgagccactcccaaagcattccgctgggggtgcttactgccgtgaggggtatgccgctggacctcatcaagatctggtagaagccgtccgtcaggtcgatggcgctatagatgacgctacctgacatggagtcgagaaccatgtccttccgcgggatcggggtttgtgccgggatggtcgcgtcattcagtttattgaacgcgtggacgatgcgccagtcgccttcttcacacagaacgtggagctagagtgtggggcggtgctttcgcggacgtggccggccaggcggtgcttttcgaagaactcgtcgatggccttgacctggtctcgcggcagtggccactgccgcgtcacgcagtacttcgttccgggcgcgaggtcgatctcgtgccgaactccgcggtcggctggaagctcggcggggatctcatcagggaagacgtcttcaaactcgcgcgcggtgtcgtagactgggttacccgactcgttcagcgcttcccaggactgcgctgcgaaacgttcttcgcgggcagacttcggttcggcactcctcggccgcgatgatgcgtcgtcaccgctgagtgcgtgaagaccctcgactgtcgcgtcggcctcggtgatcaagcacacctgctcgatgtcaccagccttcagatcgcgaaggaagtgtttccgcgagagcccggggagctgcgtgattccgcgagcgtcgcgagggggactcgagacttcgatgacccgcgtgccccgtggagcaccctccacgtattcgacagcgcagacggattccgtcgggggaggtgcggcgtcagttttgttccgtgacctgaggcgccgtcgcttggatttccttctcttcttcctcgaagacctcgagcaggagctcgaggaggacgactcgctggcactgaacgacacatcatcgctatcgctggacgatacttcaccctcctctaggtgcgaagtgtcacgcccgtccgcaccggaagtacgcgggagcaccacttgctcggccgcctcgttgattcgcgggagcaccgctagctcgaccggctcgtcgattcgcgggagcccacgtcgctcgaccgcctcgttggttcgcgggagcgcacttcgctcgaccgccacgttgggttgcgggagtcgccttcgctcgaccgccgtcgcaacaacctcgcttcgctgcgaggttccgtgttcgtttgtcggttcatccaacagcaacgcacatgccatacagagaggtccatcgctcgctctatgtagggctttcgtcgtggatgaacgatctacgacggtgacatggggccagtccgtcggagcgaccaggagatgagtgaacacttcgctcacgtcgtagtcggctcgacgcttgactgatcgggccagccagtagatctccggttgataccgtaccagccacggtatgcccaagatgcagtcgaacgcgtacttcatctcgatcaccaggaagtcgtcgttgctaccgaagccgtcgaacgtgtacggcagcgtgatatcacgccgtgggacacggtgtggcttgccggcagcgagcttaatgacgacgacgccgggaccctcccggacggatatgtccgaggggagaagcgacaaacacgaggcgcggaagtagttgttcgttgcgcctgaatccaggagcgcacggagaggacgccgcgcgccggcgacgtgcagggtgacgatgatcagtctgtggtcgccgctggtggtggtggcattgaagtgtgcgtgaagcactggggggctaggagatcgggttgccaccgggggacccggacctccgttccagccagtagggtgccccgcacctactggccccggccgttttctggttgagcgatcaggatctcgtcatcggcgcgagcgactgcagcgagcatcggcgcaggcgcgcggcatactgccgcgcgatggcccaacttcccacaacggtggcaggtcagcgaacggaaattgcggccgccgcgcgagtagtaccgccggttattctccgcggcttcgacggcatcgatttccattggctcgggcatcgctgcccgagtgtccgtcggcaactgtcgcgagtaggaagcggataccgtgtagtcctcgcgcaatgcgaggacgaacgcttcttccagcgacttctgctcggcgcgcgtgagacagtagcgcgtcattccttctcgcatgccaaacacgaagacgtggacctgcgaagccatgtcgatggggctcgtgacgatgcacgaggccaggtgacgagtcttctgtacgtagtcgcgcatggacagcttgacctgcttcaacgcgaagaactccgaacgcatccgtgattcatcttgcggaggctcgaacgcaagccaaaggtctttctggagactatccagactcgggaaggcgtgttggtccacaacaagcttgccgagggcccactccttcgccttccccgacaaacgcgacagggggaagttcactttcgccgtcggcgcctcgatcagtctcgaggcgatggcgatgtcgatctccctgaaccagcggttcaggggcagtcggtcttggccggcgccggaatacgtcgaagtctccatcttcaccgcatcgttccaggaagaatgcgagggagttgacactcaccgcttggcatcggcgagctcgcgttccatgaactcttgggcagcctggcgttgttggtcggcggtcgctgagctcagcagcgacgaactcgccggacacggcagcgaggcggtgaagggcttcccactcaacccgggtgaggtgggaaaaactcgtgtgatcaagggttacaccggacccttcggacatcaggacttggctcatcttggtcttggacgttggaaggactacaaagtgctaccaggtgtaacggggtaagagataccgtcactagcgtacactgtaggtaagaggaagcttgcaataataagctcaattcttgtctttagggtaaaatcaactctgtttatgtatgggacgggggacggacgcccccttacccttgtgaaccactcaaatctaagtctgcaactgattggatgaaatgggtctggctccccactttcaaccaatcagaacatgacagcaggtcacacgctagtcgtgtgactgcacctacttttgtgtatgtgcctatgcaacttctacctacttatgtaaatgggccctttacataagcggtgaatagagtaccatagatgccagtaccaacataaagtttcttagcaatttctacgccacccgctacagtcagtgctctcgttgtagttgacgaggtgtcagtggtatccatgaaacggttaagagcatcaacttgaacatctccactgatcactacgtcttcgccaacattgaggttctttgctacaccaacgccaccggaagcgatgaaagatcctgtgcctacagaagtcgaatcagtagcgctatctattgagggttgctggtcttgggtactgtgtaccagttgtacccattaaccggttaacccgaaccggtccaatccgaacccacgttgattatggtgattacggtaagttgtttacgccaccgatgattagacgagtaggatgattggatgaacaccggtgagtgatggttgattagatgcactaggtgataggacgcagggtcgcgtgtctataacagtagggtgtaagctccaacaattcaatcactttcgaatcttcattctacccctcaagtgccttcgctccggtcccgccgtctgcgacgtccctccctccgcttcgtccgagcttcgtgtccaagatccataccttccatcaggttatgagcccaagcaccatgtcctctgcccaagacgcctcgaccaaggtctccattgacaagttcaacggggacaactacgcgacgtggaaccgctacatgcgtggcgtgttcctgaccaagtcgacgtggcatgtcgtgaaccgcgagacgacgccgagcttcacggactcgtgggccaaggacgactacgtcaagtcgagcaacatcgcgttcggactgatgttgctccacatggacgcggactaccaccatgtggtcgacgactgcgaggaagcgtgggttgcgtggacgcgcctgaagacgctgtacggtggttcgcagaaggctggacgcatctacctgaagcgccaactcttcagcatggagatgtcggaaggcggcaacgtcttgcatcattgcaatgaggtcctcaacatcagcgccaagctcagcagcatcggcgccaagatggaggatgaggacgtggcgatctgcctgttgcgcagcctccccaagagctacgagaacgtcgtgctgaacttggagatgagcagcgctgaactacgatcgcaagacgtcgtgaaggtgctgacgaatgagcacatcaagagacaaggcgagaagacggcgacggtgaagacggagaatgcggccaaggcgttcaacaccgaccgagagtctcgccagtgtacgtactgcgggaaattggggcacacgattgacaagtgctggaccaagcagaaggacgagaatcggggcccaagacgcggcggcaatggcaatggccgtggacgcggggccaacaatgcccagtggaggaacgacgacgccagctacaactacgactacggctatgatcgagtggcgttcgcggtctcactggagtgtggcatttcgacgggcaagaatgtgtccgggttgtgggcggtcgacagcggcgcaacgcaccacatctgcaacgacaaggccaagttcgctcatttgattgagcggaatgaaggcgaactttcggtggccgacggcaacaaggcggccatcatgggtgtggggaccatcgtggaacgagtggttctgcccaacggcgacgagcgcgacatcgagatcaagaacgcgctgtacgtcccaagcatgagcaagaatctgctttcggtgccacagatcaacaagagtggtctgttccaagtcgtgttcgacagcaccaagatgcagattgcgcacaagggctccaagcaagtggtggcgacggcaaacctcgtggatggactctactggctccagacgcctcagcgatcggcgaatgcggcgaccagtgggaagacggtcgacttacacgcgcgtatgggtcacgctccggtggaggtgcttcgcaagatggtcgacaacaacatgatcaaggacgcgaaggcaccttccaagtcgagtggaccaagcgtgtgtcgcggctgccagcaagggaaaatggtccagaagccgttcccaagcaaccgtgacaagcgtcactacgacacgttcgagctgctccacttcgacgtgtgcggccccatggaagaagagtcactgggtggcagcaagtatctgctgctgatcgtggacgaagccagcggatgcatgaaggggttctgcctgcgtgccaagtcggagagcgaggactgcatcaagatgtacgtcacgaaggtgcagacgcagttcggcaagaaggtcaagtttgtgcggcacgacggagcccgtgagttcgcgaccaactcgctcaaggccttctacgaagtcgaaggcatcgagcagcaaaccacggttccgtacgcacaccagaccaacggcacggcagaacgcgccatccggaccatcgtcacgattggccgcagcatgctgcatcacgccaagctggacaagagcttctgggctgaggcggccatgacagccatctacgtgaagaatcgtctgccatcacccaagatcgaacacagactccgttcgagatcgtttacaagtccaagccgagtgtgaagcacatgcgtgtgttcggatgccagacgtacatcctgacgccgaaggaaagacggcgcaagtgggaccccaaggctcgcgccgggctgttcctcggctacgaagaagtgtccaaggcgtatcgagtttatgacatcgaggcggggcaggtggttatcagtcgcgatgtcaacttcgatgagtcgacctttgaactttcgacgcatacttcggatgaagacgtcgatgatgctgtgctggacttggacgcgctggacctggacgacaacgatggaccgcgccaaacgagcttcaagcaggcggggaagcgcaagtaccgaccgagtggcgacgacaacactaccagaagatcgcgccccgttcgccaccgagctggcttagaagaagcaagtgcgccggacgtatcctcctcgcgccgagccgaccccgacgaagaagaaaagtctggggaccaagatgaagacgacgactcgacgcctccagtgttttggcgtgccagtgccaacgctgtggaagcagcagccgatctatcggagccgacgacgttccaagaggctgtgaacggtcctgatcaagtgcactggcgcaaagcgatccgcgcggagctcaagtcgatgcgactgcgtggtgtgtttcgagctgccaagttgcctaacggacaacgcgccatcgataccaagtgggtgttcaagatcaagcgcaaagcggacggctcgatcgagaagtacaaggcgcgcctcgtggccaagggcttcaagcagaagtacgggattgactacaccgagacgttctcgcccgtggtcaagtatgtgacactgcgcatggtgatcgcgattgctaagtattttggctggcccctcgaccaactcgacgtggtgacagcattcctgtacgggataatgaaggaggtggtcttctgcgtggttccggaaggcgtcgaactggatggtgacttcgactgcctggaactggtgaaggccatctacggtctcaagcaagcttcgcgagtgtggaacgagaccttcgacgagttcgtgtgctccatcggcttccaagtgtcggccttcgatccgtgcctctacatcaaggtggtggacggtcactgcgtgcttgtactggtgtacgtggatgacgtactgattaccgggagttcgcccgagctgatcgcacgcacgaagaccgacctgaagacgcgcttcgagatgaccgacagcggcaagtgcgcgtttgttcttgggatcgagttggtggatggcccggacggcagcgtggcggcgatacgtggacgacatcctgaagcgcttcgccatggacgagtgcaaggccgtggtgagtccggtggacatgagcactcgactggttccaagcgacgcggcgaccaaggtgaacgctccatttcgcgaagctgttggtgctctgatgcacctgatgaccgccacgcgcccagacatcgcgtacgccgttggctatgtatcgcgcttcatggagaacccccaagaggaacactgggttgcggtcaagcgtatctttcgctacctgcaaggcaccaagacgcatgggatctgcttcaagccgggcgacaagatcgactttcgtggctactcggacgcggactgggccggcgacctcgccgaccgcaagtccacttcaggctacacgttcatgctcatgagtgcgcctgtgagctggggaagcaagaagcaatgaagcggagtacatcgcgctcagtctggctatccaagaaggcaagtggattcatcgcctgctatgcgagattctggcggccgctaatgagactggacccgaactcatgatccgcgaagacaaccagtcgtgcatcaagatgacgaagaacccagtgaaccacggtcgcgccaagcacatcgacatcaagtaccaccacatccgcgatgaagtcaagcgcggcgaagtcaagctccagtactgcgagacttctgtgatgctagcggacatcgtgacgaaggcgcttgcgggaccacgccacacggatctgacggtggctcaaaaggaagagcacttgagcagtagttggcaaaatgcaaagtgattcgattcaggtccttagttcgcaaccgcgtgctacctctaagcctgctactggatacctcttactggatacaccctactggattctctactggatacacagttaccttatccaatcagagaacgccacgtcgatgcccatcttgtacccacaatcctgtacccacaatcatggcgtaatcaccgtgacgtaatcatcgtcccgtaatcacctgaatgattgcggtacaacacagtgaaggtcacgccgacctcactgatgacgcgttcgcgtcacacggtcgcttggcgaggcgtcgtcacatcagtcttgacaacactcccactcgactcgtcagcgaccacgatgcccagcttcgtcctgagcgcgtcgaactgcggcgccgcgatcggcttcgtcatgatgtccgccagcatgtcgagtgtcgaaacatactgcaacaccacttgaccgtcttccaccttctcgcgcacgaagtggtagcgaatgtcgatgtgcttggtgcgcttgtggaactccgggttcttggccaacgcgatggagccttggttgtcctcgtagatcttcaccgcttcatcgctcgccatctcgcccagctcgcacagaaacaccttgagccacaccgcctcctgcgtggcctccgacagcgccatgtactcggcttccgtcgacgagagcgccaccgtgcgctgcttcttgcttcgccagctgatgcatccgccgttcatcatgaacgcgtagccgctcgtactccgtcgagactcgatgtcgccggcccagtccgcgtccgagtagccttgcagtccgtcctcgctgctcgcttgaaacacgaggccgtgcgtcttcgtgcctcggatgtagcggaagaccctcttgagcgcctgccagtgtgtcggacatgggtccgctgcgaactggctcagcactcccactgccgctgcgaggtccggacgagtccccaccatgagatacatgaggcagcccacggcgttccggtacggaacattcgccatggtctcgtcgtgcttgcagcctccctcgcacatggccttggtcagcttcagacccggatcctgcggtgtcttcacagggttgctctcatccatcttgaacttctcgagaatgtccttcgcgaacttggtctgccgcaccgacaccttcccagtcgccacatcttgctcgatctccataccgagaaagtacttgagctggcccatgtcggtcatctcgaaccggtcactcagcgcctgcttcgtgtccttcagcatcccgtcgctgctgctggcgaggaccagatcgtccacgtacagtgccacgaacatcatgtcgtgattgtcccgcttcaagtagatgcagtggtcggactcgcacttcttgaaccccagcttcaacatgaactcgtcgatcgtcttgttccacatccgcggcgactgcttcaggccgtacagcgaacgcttgagccggcacacgtagtcgggtcgatctccgtccacatatccgtccggctgcgccatgtagatgtcctcgtccaacaagccgttgaggaacgcggtcttcacatccatctggtgcactgtgagcttgtacttggccgccagactcagcaacacccgaatcgacgtgaacttggccaccggcgcgaacgtctcgtcgtagtcgatgccgtacttctgcgagaaccccttcgccaccagtcgcgccttgaaccgctcgatctctccagactggttctccttcacgcggaacacccatctgcagccgatcgccttgcgtcccttcggcagtggcaccagggtccacgtctcgttcttgcggagcgactccacctccgagtcgcacgcctctttccacttgtctgcgtcgctggattccatcgccgacttgaacgttgtcggcatctctcccactgaatccacgacgtacgcagcctcgaagtcttccttctcttgtgctgcggcagacatctcgtccagcggctgctgtcgtctcggcaccgcataccgcttggcactcggaacctccacggcttcctcgagcgactgcgtgcgcgggtgtcgcttgctgccgggtacaaagtcttgattccgcgcagcttcttctctgttctcgtctgatccggactgagtctcttcatccgtggtgtcttcatcatcatctgtcggaagacccaccaacacctccttcgaagcgtagtcgcgtctcccaccgtcgaagacatcctccatgaactgcgcgtcgcggctcaccaacacgcgaccgctctcgatctcctcaaaccgatacgccttctcgtgctccgagtacccgaggaaacgacagcgcaccgaccgagcgtcgaacttcgaccgcttctccttcggcacgtgcacgtacgcgtggcacccgaacaccttgaggttggccagcaaaggcttcttgccggtccaaacgtggtgcggcgacttgtcgtgactgatggcgcgcgtcggacaccggttgcggaggaacgtggccgtcatcactgcttctccccagtactccttcgacaacccggcgtgctccagcatgcagcgcgcacactccaccagcgtccgattcattcgctcggccactccgttgagctgaggcgtgtatggcggcgtgaacttctgctcgatgccgcgatccgcacacaacttggccatcgcacccgaagtgtactcgccgccgttgtcgctccgaagcaccttcactcgcttgccggtctgcgtctcagccaacgcgacgaacgcagcgaacttggcagccacctccgacttgttccgtagtaggtacaccacgcagaagtgcgacttgtcgtcgatgaacgtgacgaagtagcgcttgcctccgaacgtcgccgtctgcatcggaccgcacacatcgctgtggaccacctccagcacttgcttcgcacggttcggcgacgacttcatgaagcttactcgcgtttgcttgccgagtgcgcacccgtcgcacacctcccactgcttcaccgacgtcattgggatgccagtgccgtagcccttcttgacgatggcgtcgagaccaccatggccgatgtgaccaagtcgaaggtgccagaggcacgacgtggtgtccccttggcgattcttcgagcttgccgcattggcctcgtcagcaggcgtcctcggcgtcatgcagagcttgaacagtcctttgccttcgcgagcgccaagcttccacttgagacccttcgtttccgcgaagcacccgtcgctctcgaaggtcactggcccgacgtccttggtgaagcggccgacggagaacaggttgcgcgacagcttcgggatgtgccacacacccgtgagcacacccttcttcatgccgcgcggtgtctgcatcgacatcacgatgtcgccgctccccaccgcctgaaccacgccgtcgtccgccagatgcacgtccaccggagagatcttcttgtagttcttcatgtactccttcgagtacgtcatgtgctgcgtcgcacctgagtcgaccagccacatgccgctcagcttggaggcacccgtgtcgccaccaaccgagaagaggaagtcgccagagtcatcttcgacctgcgcgacgttcgctcgttgcggcctctgccgctccccgttctcgcggatccgcaccggacacttggcgatccaatgtccgtgctcgccgcagtagtgacaggcgctcgtcctctgcgcttgcgcctgccgtcccttgcgcttcccgttgtcgcttgtcatgaacgcttgaccttgagcgtgcgcggttccgtcagcaccgccaccttgttccttgcgcttcatgtcctcgtgcaggagccgagacgtcacgagctcccacgtcagcgtgtcggaacgcgattccaacgccgtgatgaggaactggtacgactcgctcagactggcaagaagcgtgattaccaagtcgtcctcgctgaccggagcgccgaccgcgtcgagctgttccgccagcgtcttgagcttgttaatgtgctccagcacatcatcaccttcgtccatcgttgtcgtgaagaaccgtcgacgaagaaagagcttgttcgccaggctcttcttctcgaagtgtccctcgagtcttgaccatgcatcatgcgcgtccttcgccgaccgcaccagcggcagctgcgagtcctccaacgcgagacagacgatcgccagcgccttgcgcgacttcttgcgaaacgtcgcttggtccgccgcggtcgtgcactgctcgagcttcacttccccactcgtcacttcccacagttcgcgctcctccagcaccatctgcatcttgaacttccatgtgtggaagttggttccgtcgaacttgttgatgcgggcggtcgcggtcggggcggcgtccatggcgaaggcgtagtcggggtcttggtcagggaagacggggcttgggctcataaccaaaaggaagaacacttgagcagtagttggcaaaatgcaaagtgattcgattcaggtccttagttcgcaaccgcgtgctacctctaagcctgctactggatacctcttactggatacaccctactggattctctactggatacacagttaccttatccaatcagagaacgccacgtcgatgcccatcttgtacccacaatcttggcgtaatcaccgtgacgtaatcatcgtcccgtaatcacctgaatgatttcggtaccacacagtgaaggtcacgccgacctcactgatgacgcgttcgcgtcacacggtcgcttggcggggcgtcgtcacatcagtcttgacaacactcccactcgactcgtcagcgaccacgatgcccagcttcgtcctgagcgcgtcgaactgcggcgccgcgatcggcttcgtcatgatgtccgccagcatgtcgagtgtcgaaacatactgcaacaccacttgaccgtcttccaccttctcgcgcacgaagtggtagcgaatgtcgatgtgcttggtgcgcttgtggaactccgggttcttggccaacgcgatggagccttggttgtcctcgtagatcttcaccgcttcatcgctcgccatctcgcccagctcgcacagaaacaccttgagccacaccgcctcctgcgtggcctccgacagcgccatgtactcggcttccgtcgacgagagcgccaccgtgcgctgcttcttgcttcgccagctgatgcatccgccgttcatcatgaacgcgtagccgctcgtactccgtcgagactcgatgtcgccggcccagtccgcgtccgagtagccttgcagtccgtcctcgctgctcgcttgaaacacgaggccgtgcgtcttcgtgcctcggatgtagcggaagaccctcttgagcgcctgccagtgtgtcggacatgggtccgctgcgaactggctcagcactcccactgccgctgcgaggtccggacgagtccccaccatgagatacatgaggcagcccacggcgttccggtacggaacattcgccatggtctcgtcgtgcttgcagcctccctcgtgatggaaggtatggatcttggacacgaagctcggacgaagcggagggagggacgtcgcagacggcgggaccggagcgaaggcacttgaggggtagaatgaagattcgaaagtgattgaattgttggagcttacaccctactgttatagacacgcgaccctgcgtcctatcacctagtgcatctaatcaaccatcactcaccggtgttcatccaatcatcctactcgtctaatcatcggtggcgtaaacaacttaccgtaatcaccataatcaacgtgggttcggattggaccggttcgggttaaccggttaatgggtacaactggtacacagtacccaagaccagcaaccctcaatagtcttaaccgtaccgctagttcactactcgaagtgtcaacgcttgccgaggccaatgtagctcctgggacttgacgacttgagggcacttgtggtcttctgtgcaaattgcgttctgatttatgtttagctggtctctctctaccgctgccatctcatctaccatcctacaaccaaacgattactggattcttgctctggcttcgcccccatgtgcttcccatccgggtcgatcggcgatccacgatcggctcccgatccacgatcgaccccaatcggcgatccacgatcggctcccgatccacgatcgcctcctgatccacgatcgatcccgatcggcgatcaactcccgatcgatgacctgtgcgagttgccgtgcgctgccgatccgtcctcttctgtcctcggccgccctagatctgcgagattggtcgtcgatccgggcttgggtctacgtcgaatcacgccgcagtccaagcgcgatcgcccgtaatctgtcttgacatatgtgttgccttacgcgtcgacgttatccaatcgcttgagatctctcgatagaccctcttgatccgcgaccgcagcctgatccctgcctatcgttctgtcaccatgtcgcttgatgtcatcgcagttggaaattctcgttcggtgcttcaccacaaagtaaatagcatcgtgttgtcaagactgatgtgacgacgccccgccaagcgaccgtgtgacgcgaacgcgtcatcagtgaggtcggcgtgaccttcactgtgtggtaccgaaatcattcaggtgattacgggacgatgattacgtcacggtgattacgccaagattgtgggtacaagatgggcatcgacgtggcgttctctgattggataaggtaactgtgtnnnnnnnnnnnnnnnnnnnnnnnnnnnnnnnnnnnnnnnnnnnnnnnnnnnnnnnnnnnnnnnnnnnnnnnnnnnnnnnnnnnnnnnnnnnnnnnnnnnnnnnnnnnnnnnnnnnnnnnnnnnnnnnnnnnnnnnnnnnnnnnnnnnnnnnnnnnnnnnnnnnnnnnnnnnnnnnnnnnnnnnnnnnnnnnnnnnnnnnnnnnnnnnnnnnnnnnnnnnnnnnnnnnnnnnnnnnnnnnnnnnnnnnnnnnnnnnnnnnnnnnnnnnnnnnnnnnnnnnnnnnnnnnnnnnnnnnnnnnnnnnnnnnnnnnnnnnnnnnnnnnnnnnnnnnnnnnnnnnnnnnnnnnnnnnnnnnnnnnnnnnnnnnnnnnnnnnnnnnnnnnnnnnnnnnnnnnnnnnnnnnnnnnnnnnnnnnnnnnnnnnnnnnnnnnnnnnnnnnnnnnnnnnnnnnnnnnnnnnnnnnnnnnnnnnnnnnnnnnnnnnnnnnnnnnnnnnnnnnnnnnnnnnnnnnnnnnnnnnnnnnnnnnnnnnnnnnnnnnnnnnnnnnnnnnnnnnnnnnnnnnnnnnnnnnnnnnnnnnnnnnnnnnnnnnnnnnnnnnnnnnnnnnnnnnnnnnnnnnnnnnnnnnnnnnnnnnnnnnnnnnnnnnnnnnnnnnnnnnnnnnnnnnnnnnnnnnnnnnnnnnnnnnnnnnnnnnnnnnnnnnnnnnnnnnnnnnnnnnnnnnnnnnnnnnnnnnnnnnnnnnnnnnnnnnnnnnnnnnnnnnnnnnnnnnnnnnnnnnnnnnnnnnnnnnnnnnnnnnnnnnnnnnnnnnnnnnnnnnnnnnnnnnnnnnnnnnnnnnnnnnnnnnnnnnnnnnnnnnnnnnnnnnnnnnnnnnnnnnnnnnnnnnnnnnnnnnnnnnnnnnnnnnnnnnnnnnnnnnnnnnnnnnnnnnnnnnnnnnnnnnnnnnnnnnnnnnnnnnnnnnnnnnnnnnnnnnnnnnnnnnnnnnnnnnnnnnnnnnnnnnnnnnnnnnnnnnnnnnnnnnnnnnnnnnnnnnnnnnnnnnnnnnnnnnnnnnnnnnnnnnnnnnnnnnnnnnnnnnnnnnnnnnnnnnnnnnnnnnnnnnnnnnnnnnnnnnnnnnnnnnnnnnnnnnnnnnnnnnnnnnnnnnnnnnnnnnnnnnnnnnnnnnnnnnnnnnnnnnnnnnnnnnnnnnnnnnnnnnnnnnnnnnnnnnnnnnnnnnnnnnnnnnnnnnnnnnnnnnnnnnnnnnnnnnnnnnnnnnnnnnnnnnnnnnnnnnnnnnnnnnnnnnnnnnnnnnnnnnnnnnnnnnnnnnnnnnnnnnnnnnnnnnnnnnnnnnnnnnnnnnnnnnnnnnnnnnnnnnnnnnnnnnnnnnnnnnnnnnnnnnnnnnnnnnnnnnnnnnnnnnnnnnnnnnnnnnnnnnnnnnnnnnnnnnnnnnnnnnnnnnnnnnnnnnnnnnnnnnnnnnnnnnnnnnnnnnnnnnnnnnnnnnnnnnnnnnnnnnnnnnnnnnnnnnnnnnnnnnnnnnnnnnnnnnnnnnnnnnnnnnnnnnnnnnnnnnnnnnnnnnnnnnnnnnnnnnnnnnnnnnnnnnnnnnnnnnnnnnnnnnnnnnnnnnnnnnnnnnnnnnnnnnnnnnnnnnnnnnnnnnnnnnnnnnnnnnnnnnnnnnnnnnnnnnnnnnnnnnnnnnnnnnnnnnnnnnnnnnnnnnnnnnnnnnnnnnnnnnnnnnnnnnnnnnnnnnnnnnnnnnnnnnnnnnnnnnnnnnnnnnnnnnnnnnnnnnnnnnnnnnnnnnnnnnnnnnnnnnnnnnnnnnnnnnnnnnnnnnnnnnnnnnnnnnnnnnnnnnnnnnnnnnnnnnnnnnnnnnnnnnnnnnnnnnnnnnnnnnnnnnnnnnnnnnnnnnnnnnnnnnnnnnnnnnnnnnnnnnnnnnnnnnnnnnnnnnnnnnnnnnnnnnnnnnnnnnnnnnnnnnnnnnnnnnnnnnnnnnnnnnnnnnnnnnnnnnnnnnnnnnnnnnnnnnnnnnnnnnnnnnnnnnnnnnnnnnnnnnnnnnnnnnnnnnnnnnnnnnnnnnnnnnnnnnnnnnnnnnnnnnnnnnnnnnnnnnnnnnnnnnnnnnnnnnnnnnnnnnnnnnnnnnnnnnnnnnnnnnnnnnnnnnnnnnnnnnnnnnnnnnnnnnnnnnnnnnnnnnnnnnnnnnnnnnnnnnnnnnnnnnnnnnnnnnnnnnnnnnnnnnnnnnnnnnnnnnnnnnnnnnnnnnnnnnnnnnnnnnnnnnnnnnnnnnnnnnnnnnnnnnnnnnnnnnnnnnnnnnnnnnnnnnnnnnnnnnnnnnnnnnnnnnnnnnnnnnnnnnnnnnnnnnnnnnnnnnnnnnnnnnnnnnnnnnnnnnnnnnnnnnnnnnnnnnnnnnnnnnnnnnnnnnnnnnnnnnnnnnnnnnnnnnnnnnnnnnnnnnnnnnnnnnnnnnnnnnnnnnnnnnnnnnnnnnnnnnnnnnnnnnnnnnnnnnnnnnnnnnnnnnnnnnnnnnnnnnnnnnnnnnnnnnnnnnnnnnnnnnnnnnnnnnnnnnnnnnnnnnnnnnnnnnnnnnnnnnnnnnnnnnnnnnnnnnnnnnnnnnnnnnnnnnnnnnnnnnnnnnnnnnnnnnnnnnnnnnnnnnnnnnnnnnnnnnnnnnnnnnnnnnnnnnnnnnnnnnnnnnnnnnnnnnnnnnnnnnnnnnnnnnnnnnnnnnnnnnnnnnnnnnnnnnnnnnnnnnnnnnnnnnnnnnnnnnnnnnnnnnnnnnnnnnnnnnnnnnnnnnnnnnnnnnnnnnnnnnnnnnnnnnnnnnnnnnnnnnnnnnnnnnnnnnnnnnnnnnnnnnnnnnnnnnnnnnnnnnnnnnnnnnnnnnnnnnnnnnnnnnnnnnnnnnnnnnnnnnnnnnnnnnnnnnnnnnnnnnnnnnnnnnnnnnnnnnnnnnnnnnnnnnnnnnnnnnnnnnnnnnnnnnnnnnnnnnnnnnnnnnnnnnnnnnnnnnnnnnnnnnnnnnnnnnnnnnnnnnnnnnnnnnnnnnnnnnnnnnnnnnnnnnnnnnnnnnnnnnnnnnnnnnnnnnnnnnnnnnnnnnnnnnnnnnnnnnnnnnnnnnnnnnnnnnnnnnnnnnnnnnnnnnnnnnnnnnnnnnnnnnnnnnnnnnnnnnnnnnnnnnnnnnnnnnnnnnnnnnnnnnnnnnnnnnnnnnnnnnnnnnnnnnnnnnnnnnnnnnnnnnnnnnnnnnnnnnnnnnnnnnnnnnnnnnnnnnnnnnnnnnnnnnnnnnnnnnnnnnnnnnnnnnnnnnnnnnnnnnnnnnnnnnnnnnnnnnnnnnnnnnnnnnnnnnnnnnnnnnnnnnnnnnnnnnnnnnnnnnnnnnnnnnnnnnnnnnnnnnnnnnnnnnnnnnnnnnnnnnnnnnnnnnnnnnnnnnnnnnnnnnnnnnnnnnnnnnnnnnnnnnnnnnnnnnnnnnnnnnnnnnnnnnnnnnnnnnnnnnnnnnnnnnnnnnnnnnnnnnnnnnnnnnnnnnnnnnnnnnnnnnnnnnnnnnnnnnnnnnnnnnnnnnnnnnnnnnnnnnnnnnnnnnnnnnnnnnnnnnnnnnnnnnnnnnnnnnnnnnnnnnnnnnnnnnnnnnnnnnnnnnnnnnnnnnnnnnnnnnnnnnnnnnnnnnnnnnnnnnnnnnnnnnnnnnnnnnnnnnnnnnnnnnnnnnnnnnnnnnnnnnnnnnnnnnnnnnnnnnnnnnnnnnnnnnnnnnnnnnnnnnnnnnnnnnnnnnnnnnnnnnnnnnnnnnnnnnnnnnnnnnnnnnnnnnnnnnnnnnnnnnnnnnnnnnnnnnnnnnnnnnnnnnnnnnnnnnnnnnnnnnnnnnnnnnnnnnnnnnnnnnnnnnnnnnnnnnnnnnnnnnnnnnnnnnnnnnnnnnnnnnnnnnnnnnnnnnnnnnnnnnnnnnnnnnnnnnnnnnnnnnnnnnnnnnnnnnnnnnnnnnnnnnnnnnnnnnnnnnnnnnnnnnnnnnnnnnnnnnnnnnnnnnnnnnnnnnnnnnnnnnnnnnnnnnnnnnnnnnnnnnnnnnnnnnnnnnnnnnnnnnnnnnnnnnnnnnnnnnnnnnnnnnnnnnnnnnnnnnnnnnnnnnnnnnnnnnnnnnnnnnnnnnnnnnnnnnnnnnnnnnnnnnnnnnnnnnnnnnnnnnnnnnnnnnnnnnnnnnnnnnnnnnnnnnnnnnnnnnnnnnnnnnnnnnnnnnnnnnnnnnnnnnnnnnnnnnnnnnnnnnnnnnnnnnnnnnnnnnnnnnnnnnnnnnnnnnnnnnnnnnnnnnnnnnnnnnnnnnnnnnnnnnnnnnnnnnnnnnnnnnnnnnnnnnnnnnnnnnnnnnnnnnnnnnnnnnnnnnnnnnnnnnnggcttgaagcagatcccatgcgtcttggtgccttccaggtagcgaaagatacgcttgaccgcaacccagtgttcctcttgggggttctccatgaagcgcgatacatagccaacggcgtacgcgatgtctgggcgcgtggcggtcatcaggtgcatcagagcaccaacagcttcgcgaaacggagcgttcaccttggtcgccgcgtcgcttggaaccagtcgagtgctcatgtccaccggactcaccccggccttgcactcgtccatggcgaagcgcttcaggatgtcgtccacgtatcgccgctggcacatggtcacgctgccgtccgggccgtccaccaactcgatcccaagaacacacgcgcacttgccgctgtcggtcatctcgaagcgcgtcttcaggtcggtcttcgtgcgtgcgatcagctcgggcgaactcccggtaatcagtacgtcatccacgtacaccagtacaagcacgcagtgaccgtccaccaccttgatgtagaggcacggatcgaaggccgacacttggaagccgatggagcacacgaactcgtcgaaggtctcgttccacactcgcgaagcttgcttgagaccgtagatggccttcaccagttccaggcagtcgaagtcaccattcagttcgacgccttccggaaccacgcagaagaccacctccttcattatcccgtacaggaatgccgtcaccacgtcgagttggtcgaggggccagccaaaatacttagcaattgcgatcaccatgcgcagcgtcacatacttgaccacgggcgagaacgtctcggtgtagtcaatgccgtacttctgcttgaagcccttggccacgaggcgcgccttgtacttctcgatcgagccgtccgctttgcgcttgatcttgaacacccacttggtatcgatggcgcgttgtccgttaggcaacttggcagctcgaaacacaccacgcagtcgcatcgacttgagctccgcgcggatcgcttgcgccagtgcacttgatcaggaccgttcacagcctcttggaacgtcgtcggctccgatagatcggctgctgcttccacagcgttggcactggcacgccaaaacactggaggcgtcgagtcgtcgtcttcatcttggtccccagacttttcttcttcgtcggggtcggctcggcgcgaggaggatacgtccggcgcacttgcttcttctaagccagctcggtggcgaacggggcgcgaccttctggcagtgttgtcgtcgccactcggtcggtacttgcgcttccccgcctgcttgaagctcgtttggcgcggtccatcgttgtcgtccaggtccagcgcgtccaagtccagcacagcatcatcgacgtcttcatccgaagtatgcgtcgaaagtccaaaggtcgactcatcgaagttgacatcgcgactgataaccacctgccccgcctcgatgtcataaactcgatacgccttggacacttcttcgtagccgaggaacagcccggcgcgagccttggggtcccacttgcgccgtctttccttcggcgtcaggatgtacgtctggcatccgaacacacgcatgtgcttcacactcggcttggacttgtaaacgatctcgaacggagtcttgtgttcgatcttgggtgatggcagacgattcttcacgtagatggctgtcatggccgcctcagcccagaagctcttgtccagcttggcgtgatgcagcatgctgcggccaatcgtgacgatggtccggatggcgcgttctgccgtgccgttggtctggtgcgcgtacggaaccgtggtttgctgctcgatgccttcgacttcgtagaaggccttgagcgagttggtcgcgaactcacgggctccgtcgtgccgcacaaacttgaccttcttgccgaactgcgtctgcaccttcgtgacgtacatcttgatgcagtcctcgctctccgacttggcacgcagacagaaccccttcatgcatccgctggcttcgtccacgatcagcagcaggtacttgctgccacccagtgacccttcttccatggggccgcacacgtcgaagtggagcagctcgaacgtgtcgtagtgacgcttgtcacggttgcttgggaacggcttctggaccattttcccttgctggcagccgcgacacacgcttggtccactcgacttggaaggtgccttcgcgtccttgatgatgttgttgtcgaccatcttgcgaagcacctccaccggagcggggnnnnnnnnnnnnnnnnnnnnnnnnnnnnnnnnnnnnnnnnnnnnnnnnnnnnnnnnnnnnnnnnnnnnnnnnnnnnnnnnnnnnnnnnnnnnnnnnnnnnnnnnnnnnnnnnnnnnnnnnnnnnnnnnnnnnnnnnnnnnnnnnnnnnnnnnnnnnnnnnnnnnnnnnnnnnnnnnnnnnnnnnnnnnnnnnnnnnnnnnnnnnnnnnnnnnnnnnnnnnnnnnnnnnnnnnnnnnnnnnnnnnnnnnnnnnnnnnnnnnnnnnnnnnnnnnnnnnnnnnnnnnnnnnnnnnnnnnnnnnnnnnnnnnnnnnnnnnnnnnnnnnnnnnnnnnnnnnnnnnnnnnnnnnnnnnnnnnnnnnnnnnnnnnnnnnnnnnnnnnnnnnnnnnnnnnnnnnnnnnnnnnnnnnnnnnnnnnnnnnnnnnnnnnnnnnnnnnnnnnnnnnnnnnnnnnnnnnnnnnnnnnnnnnnnnnnnnnnnnnnnnnnnnnnnnnnnnnnnnnnnnnnnnnnnnnnnnnnnnnnnnnnnnnnnnnnnnnnnnnnnnnnnnnnnnnnnnnnnnnnnnnnnnnnnnnnnnnnnnnnnnnnnnnnnnnnnnnnnnnnnnnnnnnnnnnnnnnnnnnnnnnnnnnnnnnnnnnnnnnnnnnnnnnnnnnnnnnnnnnnnnnnnnnnnnnnnnnnnnnnnnnnnnnnnnnnnnnnnnnnnnnnnnnnnnnnnnnnnnnnnnnnnnnnnnnnnnnnnnnnnnnnnnnnnnnnnnnnnnnnnnnnnnnnnnnnnnnnnnnnnnnnnnnnnnnnnnnnnnnnnnnnnnnnnnnnnnnnnnnnnnnnnnnnnnnnnnnnnnnnnnnnnnnnnnnnnnnnnnnnnnnnnnnnnnnnnnnnnnnnnnnnnnnnnnnnnnnnnnnnnnnnnnnnnnnnnnnnnnnnnnnnnnnnnnnnnnnnnnnnnnnnnnnnnnnnnnnnnnnnnnnnnnnnnnnnnnnnnnnnnnnnnnnnnnnnnnnnnnnnnnnnnnnnnnnnnnnnnnnnnnnnnnnnnnnnnnnnnnnnnnnnnnnnnnnnnnnnnnnnnnnnnnnnnnnnnnnnnnnnnnnnnnnnnnnnnnnnnnnnnnnnnnnnnnnnnnnnnnnnnnnnnnnnnnnnnnnnnnnnnnnnnnnnnnnnnnnnnnnnnnnnnnnnnnnnnnnnnnnnnnnnnnnnnnnnnnnnnnnnnnnnnnnnnnnnnnnnnnnnnnnnnnnnnnnnnnnnnnnnnnnnnnnnnnnnnnnnnnnnnnnnnnnnnnnnnnnnnnnnnnnnnnnnnnnnnnnnnnnnnnnnnnnnnnnnnnnnnnnnnnnnnnnnnnnnnnnnnnnnnnnnnnnnnnnnnnnnnnnnnnnnnnnnnnnnnnnnnnnnnnnnnnnnnnnnnnnnnnnnnnnnnnnnnnnnnnnnnnnnnnnnnnnnnnnnnnnnnnnnnnnnnnnnnnnnnnnnnnnnnnnnnnnnnnnnnnnnnnnnnnnnnnnnnnnnnnnnnnnnnnnnnnnnnnnnnnnnnnnnnnnnnnnnnnnnnnnnnnnnnnnnnnnnnnnnnnnnnnnnnnnnnnnnnnnnnnnnnnnnnnnnnnnnnnnnnnnnnnnnnnnnnnnnnnnnnnnnnnnnnnnnnnnnnnnnnnnnnnnnnnnnnnnnnnnnnnnnnnnnnnnnnnnnnnnnnnnnnnnnnnnnnnnnnnnnnnnnnnnnnnnnnnnnnnnnnnnnnnnnnnnnnnnnnnnnnnnnnnnnnnnnnnnnnnnnnnnnnnnnnnnnnnnnnnnnnnnnnnnnnnnnnnnnnnnnnnnnnnnnnnnnnnnnnnnnnnnnnnnnnnnnnnnnnnnnnnnnnnnnnnnnnnnnnnnnnnnnnnnnnnnnnnnnnnnnnnnnnnnnnnnnnnnnnnnnnnnnnnnnnnnnnnnnnnnnnnnnnnnnnnnnnnnnnnnnnnnnnnnnnnnnnnnnnnnnnnnnnnnnnnnnnnnnnnnnnnnnnnnnnnnnnnnnnnnnnnnnnnnnnnnnnnnnnnnnnnnnnnnnnnnnnnnnnnnnnnnnnnnnnnnnnnnnnnnnnnnnnnnnnnnnnnnnnnnnnnnnnnnnnnnnnnnnnnnnnnnnnnnnnnnnnnnnnnnnnnnnnnnnnnnnnnnnnnnnnnnnnnnnnnnnnnnnnnnnnnnnnnnnnnnnnnnnnnnnnnnnnnnnnnnnnnnnnnnnnnnnnnnnnnnnnnnnnnnnnnnnnnnnnnnnnnnnnnnnnnnnnnnnnnnnnnnnnnnnnnnnnnnnnnnnnnnnnnnnnnnnnnnnnnnnnnnnnnnnnnnnnnnnnnnnnnnnnnnnnnnnnnnnnnnnnnnnnnnnnnnnnnnnnnnnnnnnnnnnnnnnnnnnnnnnnnnnnnnnnnnnnnnnnnnnnnnnnnnnnnnnnnnnnnnnnnnnnnnnnnnnnnnnnnnnnnnnnnnnnnnnnnnnnnnnnnnnnnnnnnnnnnnnnnnnnnnnnnnnnnnnnnnnnnnnnnnnnnnnnnnnnnnnnnnnnnnnnnnnnnnnnnnnnnnnnnnnnnnnnnnnnnnnnnnnnnnnnnnnnnnnnnnnnnnnnnnnnnnnnnnnnnnnnnnnnnnnnnnnnnnnnnnnnnnnnnnnnnnnnnnnnnnnnnnnnnnnnnnnnnnnnnnnnnnnnnnnnnnnnnnnnnnnnnnnnnnnnnnnnnnnnnnnnnnnnnnnnnnnnnnnnnnnnnnnnnnnnnnnnnnnnnnnnnnnnnnnnnnnnnnnnnnnnnnnnnnnnnnnnnnnnnnnnnnnnnnnnnnnnnnnnnnnnnnnnnnnnnnnnnnnnnnnnnnnnnnnnnnnnnnnnnnnnnnnnnnnnnnnnnnnnnnnnnnnnnnnnnnnnnnnnnnnnnnnnnnnnnnnnnnnnnnnnnnnnnnnnnnnnnnnnnnnnnnnnnnnnnnnnnnnnnnnnnnnnnnnnnnnnnnnnnnnnnnnnnnnnnnnnnnnnnnnnnnnnnnnnnnnnnnnnnnnnnnnnnnnnnnnnnnnnnnnnnnnnnnnnnnnnnnnnnnnnnnnnnnnnnnnnnnnnnnnnnnnnnnnnnnnnnnnnnnnnnnnnnnnnnnnnnnnnnnnnnnnnnnnnnnnnnnnnnnnnnnnnnnnnnnnnnnnnnnnnnnnnnnnnnnnnnnnnnnnnnnnnnnnnnnnnnnnnnnnnnnnnnnnnnnnnnnnnnnnnnnnnnnnnnnnnnnnnnnnnnnnnnnnnnnnnnnnnnnnnnnnnnnnnnnnnnnnnnnnnnnnnnnnnnnnnnnnnnnnnnnnnnnnnnnnnnnnnnnnnnnnnnnnnnnnnnnnnnnnnnnnnnnnnnnnnnnnnnnnnnnnnnnnnnnnnnnnnnnnnnnnnnnnnnnnnnnnnnnnnnnnnnnnnnnnnnnnnnnnnnnnnnnnnnnnnnnnnnnnnnnnnnnnnnnnnnnnnnnnnnnnnnnnnnnnnnnnnnnnnnnnnnnnnnnnnnnnnnnnnnnnnnnnnnnnnnnnnnnnnnnnnnnnnnnnnnnnnnnnnnnnnnnnnnnnnnnnnnnnnnnnnnnnnnnnnnnnnnnnnnnnnnnnnnnnnnnnnnnnnnnnnnnnnnnnnnnnnnnnnnnnnnnnnnnnnnnnnnnnnnnnnnnnnnnnnnnnnnnnnnnnnnnnnnnnnnnnnnnnnnnnnnnnnnnnnnnnnnnnnnnnnnnnnnnnnnnnnnnnnnnnnnnnnnnnnnnnnnnnnnnnnnnnnnnnnnnnnnnnnnnnnnnnnnnnnnnnnnnnnnnnnnnnnnnnnnnnnnnnnnnnnnnnnnnnnnnnnnnnnnnnnnnnnnnnnnnnnnnnnnnnnnnnnnnnnnnnnnnnnnnnnnnnnnnnnnnnnnnnnnnnnnnnnnnnnnnnnnnnnnnnnnnnnnnnnnnnnnnnnnnnnnnnnnnnnnnnnnnnnnnnnnnnnnnnnnnnnnnnnnnnnnnnnnnnnnnnnnnnnnnnnnnnnnnnnnnnnnnnnnnnnnnnnnnnnnnnnnnnnnnnnnnnnnnnnnnnnnnnnnnnnnnnnnnnnnnnnnnnnnnnnnnnnnnnnnnnnnnnnnnnnnnnnnnnnnnnnnnnnnnnnnnnnnnnnnnnnnnnnnnnnnnnnnnnnnnnnnnnnnnnnnnnnnnnnnnnnnnnnnnnnnnnnnnnnnnnnnnnnnnnnnnnnnnnnnnnnnnnnnnnnnnnnnnnnnnnnnnnnnnnnnnnnnnnnnnnnnnnnnnnnnnnnnnnnnnnnnnnnnnnnnnnnnnnnnnnnnnnnnnnnnnnnnnnnnnnnnnnnnnnnnnnnnnnnnnnnnnnnnnnnnnnnnnnnnnnnnnnnnnnnnnnnnnnnnnnnnnnnnnnnnnnnnnnnnnnnnnnnnnnnnnnnnnnnnnnnnnnnnnnnnnnnnnnnnnnnnnnnnnnnnnnnnnnnnnnnnnnnnnnnnnnnnnnnnnnnnnnnnnnnnnnnnnnnnnnnnnnnnnnnnnnnnnnnnnnnnnnnnnnnnnnnnnnnnnnnnnnnnnnnnnnnnnnnnnnnnnnnnnnnnnnnnnnnnnnnnnnnnnnnnnnnnnnnnnnnnnnnnnnnnnnnnnnnnnnnnnnnnnnnnnnnnnnnnnnnnnnnnnnnnnnnnnnnnnnnnnnnnnnnnnnnnnnnnnnnnnnnnnnnnnnnnnnnnnnnnnnnnnnnnnnnnnnnnnnnnnnnnnnnnnnnnnnnnnnnnnnnnnnnnnnnnnnnnnnnnnnnnnnnnnnnnnnnnnnnnnnnnnnnnnnnnnnnnnnnnnnnnnnnnnnnnnnnnnnnnnnnnnnnnnnnnnnnnnnnnnnnnnnnnnnnnnnnnnnnnnnnnnnnnnnnnnnnnnnnnnnnnnnnnnnnnnnnnnnnnnnnnnnnnnnnnnnnnnnnnnnnnnnnnnnnnnnnnnnnnnnnnnnnnnnnnnnnnnnnnnnnnnnnnnnnnnnnnnnnnnnnnnnnnnnnnnnnnnnnnnnnnnnnnnnnnnnnnnnnnnnnnnnnnnnnnnnnnnnnnnnnnnnnnnnnnnnnnnnnnnnnnnnnnnnnnnnnnnnnnnnnnnnnnnnnnnnnnnnnnnnnnnnnnnnnnnnnnnnnnnnnnnnnnnnnnnnnnnnnnnnnnnnnnnnnnnnnnnnnnnnnnnnnnnnnnnnnnnnnnnnnnnnnnnnnnnnnnnnnnnnnnnnnnnnnnnnnnnnnnnnnnnnnnnnnnnnnnnnnnnnnnnnnnnnnnnnnnnnnnnnnnnnnnnnnnnnnnnnnnnnnnnnnnnnnnnnnnnnnnnnnnnnnnnnnnnnnnnnnnnnnnnnnnnnnnnnnnnnnnnnnnnnnnnnnnnnnnnnnnnnnnnnnnnnnnnnnnnnnnnnnnnnnnnnnnnnnnnnnnnnnnnnnnnnnnnnnnnnnnnnnnnnnnnnnnnnnnnnnnnnnnnnnnnnnnnnnnnnnnnnnnnnnnnnnnnnnnnnnnnnnnnnnnnnnnnnnnnnnnnnnnnnnnnnnnnnnnnnnnnnnnnnnnnnnnnnnnnnnnnnnnnnnnnnnnnnnnnnnnnnnnnnnnnnnnnnnnnnnnnnnnnnnnnnnnnnnnnnnnnnnnnnnnnnnnnnnnnnnnnnnnnnnnnnnnnnnnnnnnnnnnnnnnnnnnnnnnnnnnnnnnnnnnnnnnnnnnnnnnnnnnnnnnnnnnnnnnnnnnnnnnnnnnnnnnnnnnnnnnnnnnnnnnnnnnnnnnnnnnnnnnnnnnnnnnnnnnnnnnnnnnnnnnnnnnnnnnnnnnnnnnnnnnnnnnnnnnnnnnnnnnnnnnnnnnnnnnnnnnnnnnnnnnnnnnnnnnnnnnnnnnnnnnnnnnnnnnnnnnnnnnnnnnnnnnnnnnnnnnnnnnnnnnnnnnnnnnnnnnnnnnnnnnnnnnnnnnnnnnnnnnnnnnnnnnnnnnnnnnnnnnnnnnnnnnnnnnnnnnnnnnnnnnnnnnnnnnnnnnnnnnnnnnnnnnnnnnnnnnnnnnnnnnnnnnnnnnnnnnnnnnnnnnnnnnnnnnnnnnnnnnnnnnnnnnnnnnnnnnnnnnnnnnnnnnnnnnnnnnnnnnnnnnnnnnnnnnnnnnnnnnnnnnnnnnnnnnnnnnnnnnnnnnnnnnnnnnnnnnnnnnnnnnnnnnnnnnnnnnnnnnnnnnnnnnnnnnnnnnnnnnnnnnnnnnnnnnnnnnnnnnnnnnnnnnnnnnnnnnnnnnnnnnnnnnnnnnnnnnnnnnnnnnnnnnnnnnnnnnnnnnnnnnnnnnnnnnnnnnnnnnnnnnnnnnnnnnnnnnnnnnnnnnnnnnnnnnnnnnnnnnnnnnnnnnnnnnnnnnnnnnnnnnnnnnnnnnnnnnnnnnnnnnnnnnnnnnnnnnnnnnnnnnnnnnnnnnnnnnnnnnnnnnnnnnnnnnnnnnnnnnnnnnnnnnnnnnnnnnnnnnnnnnnnnnnnnnnnnnnnnnnnnnnnnnnnnnnnnnnnnnnnnnnnnnnnnnnnnnnnnnnnnnnnnnnnnnnnnnnnnnnnnnnnnnnnnnnnnnnnnnnnnnnnnnnnnnnnnnnnnnnnnnnnnnnnnnnnnnnnnnnnnnnnnnnnnnnnnnnnnnnnnnnnnnnnnnnnnnnnnnnnnnnnnnnnnnnnnnnnnnnnnnnnnnnnnnnnnnnnnnnnnnnnnnnnnnnnnnnnnnnnnnnnnnnnnnnnnnnnnnnnnnnnnnnnnnnnnnnnnnnnnnnnnnnnnnnnnnnnnnnnnnnnnnnnnnnnnnnnnnnnnnnnnnnnnnnnnnnnnnnnnnnnnnnnnnnnnnnnnnnnnnnnnnnnnnnnnnnnnnnnnnnnnnnnnnnnnnnnnnnnnnnnnnnnnnnnnnnnnnnnnnnnnnnnnnnnnnnnnnnnnnnnnnnnnnnnnnnnnnnnnnnnnnnnnnnnnnnnnnnnnnnnnnnnnnnnnnnnnnnnnnnnnnnnnnnnnnnnnnnnnnnnnnnnnnnnnnnnnnnnnnnnnnnnnnnnnnnnnnnnnnnnnnnnnnnnnnnnnnnnnnnnnnnnnnnnnnnnnnnnnnnnnnnnnnnnnnnnnnnnnnnnnnnnnnnnnnnnnnnnnnnnnnnnnnnnnnnnnnnnnnnnnnnnnnnnnnnnnnnnnnnnnnnnnnnnnnnnnnnnnnnnnnnnnnnnnnnnnnnnnnnnnnnnnnnnnnnnnnnnnnnnnnnnnnnnnnnnnnnnnnnnnnnnnnnnnnnnnnnnnnnnnnnnnnnnnnnnnnnnnnnnnnnnnnnnnnnnnnnnnnnnnnnnnnnnnnnnnnnnnnnnnnnnnnnnnnnnnnnnnnnnnnnnnnnnnnnnnnnnnnnnnnnnnnnnnnnnnnnnnnnnnnnnnnnnnnnnnnnnnnnnnnnnnnnnnnnnnnnnnnnnnnnnnnnnnnnnnnnnnnnnnnnnnnnnnnnnnnnnnnnnnnnnnnnnnnnnnnnnnnnnnnnnnnnnnnnnnnnnnnnnnnnnnnnnnnnnnnnnnnnnnnnnnnnnnnnnnnnnnnnnnnnnnnnnnnnnnnnnnnnnnnnnnnnnnnnnnnnnnnnnnnnnnnnnnnnnnnnnnnnnnnnnnnnnnnnnnnnnnnnnnnnnnnnnnnnnnnnnnnnnnnnnnnnnnnnnnnnnnnnnnnnnnnnnnnnnnnnnnnnnnnnnnnnnnnnnnnnnnnnnnnnnnnnnnnnnnnnnnnnnnnnnnnnnnnnnnnnnnnnnnnnnnnnnnnnnnnnnnnnnnnnnnnnnnnnnnnnnnnnnnnnnnnnnnnnnnnnnnnnnnnnnnnnnnnnnnnnnnnnnnnnnnnnnnnnnnnnnnnnnnnnnnnnnnnnnnnnnnnnnnnnnnnnnnnnnnnnnnnnnnnnnnnnnnnnnnnnnnnnnnnnnnnnnnnnnnnnnnnnnnnnnnnnnnnnnnnnnnnnnnnnnnnnnnnnnnnnnnnnnnnnnnnnnnnnnnnnnnnnnnnnnnnnnnnnnnnnnnnnnnnnnnnnnnnnnnnnnnnnnnnnnnnnnnnnnnnnnnnnnnnnnnnnnnnnnnnnnnnnnnnnnnnnnnnnnnnnnnnnnnnnnnnnnnnnnnnnnnnnnnnnnnnnnnnnnnnnnnnnnnnnnnnnnnnnnnnnnnnnnnnnnnnnnnnnnnnnnnnnnnnnnnnnnnnnnnnnnnnnnnnnnnnnnnnnnnnnnnnnnnnnnnnnnnnnnnnnnnnnnnnnnnnnnnnnnnnnnnnnnnnnnnnnnnnnnnnnnnnnnnnnnnnnnnnnnnnnnnnnnnnnnnnnnnnnnnnnnnnnnnnnnnnnnnnnnnnnnnnnnnnnnnnnnnnnnnnnnnnnnnnnnnnnnnnnnnnnnnnnnnnnnnnnnnnnnnnnnnnnnnnnnnnnnnnnnnnnnnnnnnnnnnnnnnnnnnnnnnnnnnnnnnnnnnnnnnnnnnnnnnnnnnnnnnnnnnnnnnnnnnnnnnnnnnnnnnnnnnnnnnnnnnnnnnnnnnnnnnnnnnnnnnnnnnnnnnnnnnnnnnnnnnnnnnnnnnnnnnnnnnnnnnnnnnnnnnnnnnnnnnnnnnnnnnnnnnnnnnnnnnnnnnnnnnnnnnnnnnnnnnnnnnnnnnnnnnnnnnnnnnnnnnnnnnnnnnnnnnnnnnnnnnnnnnnnnnnnnnnnnnnnnnnnnnnnnnnnnnnnnnnnnnnnnnnnnnnnnnnnnnnnnnnnnnnnnnnnnnnnnnnnnnnnnnnnnnnnnnnnnnnnnnnnnnnnnnnnnnnnnnnnnnnnnnnnnnnnnnnnnnnnnnnnnnnnnnnnnnnnnnnnnnnnnnnnnnnnnnnnnnnnnnnnnnnnnnnnnnnnnnnnnnnnnnnnnnnnnnnnnnnnnnnnnnnnnnnnnnnnnnnnnnnnnnnnnnnnnnnnnnnnnnnnnnnnnnnnnnnnnnnnnnnnnnnnnnnnnnnnnnnnnnnnnnnnnnnnnnnnnnnnnnnnnnnnnnnnnnnnnnnnnnnnnnnnnnnnnnnnnnnnnnnnnnnnnnnnnnnnnnnnnnnnnnnnnnnnnnnnnnnnnnnnnnnnnnnnnnnnnnnnnnnnnnnnnnnnnnnnnnnnnnnnnnnnnnnnnnnnnnnnnnnnnnnnnnnnnnnnnnnnnnnnnnnnnnnnnnnnnnnnnnnnnnnnnnnnnnnnnnnnnnnnnnnnnnnnnnnnnnnnnnnnnnnnnnnnnnnnnnnnnnnnnnnnnnnnnnnnnnnnnnnnnnnnnnnnnnnnnnnnnnnnnnnnnnnnnnnnnnnnnnnnnnnnnnnnnnnnnnnnnnnnnnnnnnnnnnnnnnnnnnnnnnnnnnnnnnnnnnnnnnnnnnnnnnnnnnnnnnnnnnnnnnnnnnnnnnnnnnnnnnnnnnnnnnnnnnnnnnnnnnnnnnnnnnnnnnnnnnnnnnnnnnnnnnnnnnnnnnnnnnnnnnnnnnnnnnnnnnnnnnnnnnnnnnnnnnnnnnnnnnnnnnnnnnnnnnnnnnnnnnnnnnnnnnnnnnnnnnnnnnnnnnnnnnnnnnnnnnnnnnnnnnnnnnnnnnnnnnnnnnnnnnnnnnnnnnnnnnnnnnnnnnnnnnnnnnnnnnnnnnnnnnnnnnnnnnnnnnnnnnnnnnnnnnnnnnnnnnnnnnnnnnnnnnnnnnnnnnnnnnnnnnnnnnnnnnnnnnnnnnnnnnnnnnnnnnnnnnnnnnnnnnnnnnnnnnnnnnnnnnnnnnnnnnnnnnnnnnnnnnnnnnnnnnnnnnnnnnnnnnnnnnnnnnnnnnnnnnnnnnnnnnnnnnnnnnnnnnnnnnnnnnnnnnnnnnnnnnnnnnnnnnnnnnnnnnnnnnnnnnnnnnnnnnnnnnnnnnnnnnnnnnnnnnnnnnnnnnnnnnnnnnnnnnnnnnnnnnnnnnnnnnnnnnnnnnnnnnnnnnnnnnnnnnnnnnnnnnnnnnnnnnnnnnnnnnnnnnnnnnnnnnnnnnnnnnnnnnnnnnnnnnnnnnnnnnnnnnnnnnnnnnnnnnnnnnnnnnnnnnnnnnnnnnnnnnnnnnnnnnnnnnnnnnnnnnnnnnnnnnnnnnnnnnnnnnnnnnnnnnnnnnnnnnnnnnnnnnnnnnnnnnnnnnnnnnnnnnnnnnnnnnnnnnnnnnnnnnnnnnnnnnnnnnnnnnnnnnnnnnnnnnnnnnnnnnnnnnnnnnnnnnnnnnnnnnnnnnnnnnnnnnnnnnnnnnnnnnnnnnnnnnnnnnnnnnnnnnnnnnnnnnnnnnnnnnnnnnnnnnnnnnnnnnnnnnnnnnnnnnnnnnnnnnnnnnnnnnnnnnnnnnnnnnnnnnnnnnnnnnnnnnnnnnnnnnnnnnnnnnnnnnnnnnnnnnnnnnnnnnnnnnnnnnnnnnnnnnnnnnnnnnnnnnnnnnnnnnnnnnnnnnnnnnnnnnnnnnnnnnnnnnnnnnnnnnnnnnnnnnnnnnnnnnnnnnnnnnnnnnnnnnnnnnnnnnnnnnnnnnnnnnnnnnnnnnnnnnnnnnnnnnnnnnnnnnnnnnnnnnnnnnnnnnnnnnnnnnnnnnnnnnnnnnnnnnnnnnnnnnnnnnnnnnnnnnnnnnnnnnnnnnnnnnnnnnnnnnnnnnnnnnnnnnnnnnnnnnnnnnnnnnnnnnnnnnnnnnnnnnnnnnnnnnnnnnnnnnnnnnnnnnnnnnnnnnnnnnnnnnnnnnnnnnnnnnnnnnnnnnnnnnnnnnnnnnnnnnnnnnnnnnnnnnnnnnnnnnnnnnnnnnnnnnnnnnnnnnnnnnnnnnnnnnnnnnnnnnnnnnnnnnnnnnnnnnnnnnnnnnnnnnnnnnnnnnnnnnnnnnnnnnnnnnnnnnnnnnnnnnnnnnnnnnnnnnnnnnnnnnnnnnnnnnnnnnnnnnnnnnnnnnnnnnnnnnnnnnnnnnnnnnnnnnnnnnnnnnnnnnnnnnnnnnnnnnnnnnnnnnnnnnnnnnnnnnnnnnnnnnnnnnnnnnnnnnnnnnnnnnnnnnnnnnnnnnnnnnnnnnnnnnnnnnnnnnnnnnnnnnnnnnnnnnnnnnnnnnnnnnnnnnnnnnnnnnnnnnnnnnnnnnnnnnnnnnnnnnnnnnnnnnnnnnnnnnnnnnnnnnnnnnnnnnnnnnnnnnnnnnnnnnnnnnnnnnnnnnnnnnnnnnnnnnnnnnnnnnnnnnnnnnnnnnnnnnnnnnnnnnnnnnnnnnnnnnnnnnnnnnnnnnnnnnnnnnnnnnnnnnnnnnnnnnnnnnnnnnnnnnnnnnnnnnnnnnnnnnnnnnnnnnnnnnnnnnnnnnnnnnnnnnnnnnnnnnnnnnnnnnnnnnnnnnnnnnnnnnnnnnnnnnnnnnnnnnnnnnnnnnnnnnnnnnnnnnnnnnnnnnnnnnnnnnnnnnnnnnnnnnnnnnnnnnnnnnnnnnnnnnnnnnnnnnnnnnnnnnnnnnnnnnnnnnnnnnnnnnnnnnnnnnnnnnnnnnnnnnnnnnnnnnnnnnnnnnnnnnnnnnnnnnnnnnnnnnnnnnnnnnnnnnnnnnnnnnnnnnnnnnnnnnnnnnnnnnnnnnnnnnnnnnnnnnnnnnnnnnnnnnnnnnnnnnnnnnnnnnnnnnnnnnnnnnnnnnnnnnnnnnnnnnnnnnnnnnnnnnnnnnnnnnnnnnnnnnnnnnnnnnnnnnnnnnnnnnnnnnnnnnnnnnnnnnnnnnnnnnnnnnnnnnnnnnnnnnnnnnnnnnnnnnnnnnnnnnnnnnnnnnnnnnnnnnnnnnnnnnnnnnnnnnnnnnnnnnnnnnnnnnnnnnnnnnnnnnnnnnnnnnnnnnnnnnnnnnnnnnnnnnnnnnnnnnnnnnnnnnnnnnnnnnnnnnnnnnnnnnnnnnnnnnnnnnnnnnnnnnnnnnnnnnnnnnnnnnnnnnnnnnnnnnnnnnnnnnnnnnnnnnnnnnnnnnnnnnnnnnnnnnnnnnnnnnnnnnnnnnnnnnnnnnnnnnnnnnnnnnnnnnnnnnnnnnnnnnnnnnnnnnnnnnnnnnnnnnnnnnnnnnnnnnnnnnnnnnnnnnnnnnnnnnnnnnnnnnnnnnnnnnnnnnnnnnnnnnnnnnnnnnnnnnnnnnnnnnnnnnnnnnnnnnnnnnnnnnnnnnnnnnnnnnnnnnnnnnnnnnnnnnnnnnnnnnnnnnnnnnnnnnnnnnnnnnnnnnnnnnnnnnnnnnnnnnnnnnnnnnnnnnnnnnnnnnnnnnnnnnnnnnnnnnnnnnnnnnnnnnnnnnnnnnnnnnnnnnnnnnnnnnnnnnnnnnnnnnnnnnnnnnnnnnnnnnnnnnnnnnnnnnnnnnnnnnnnnnnnnnnnnnnnnnnnnnnnnnnnnnnnnnnnnnnnnnnnnnnnnnnnnnnnnnnnnnnnnnnnnnnnnnnnnnnnnnnnnnnnnnnnnnnnnnnnnnnnnnnnnnnnnnnnnnnnnnnnnnnnnnnnnnnnnnnnnnnnnnnnnnnnnnnnnnnnnnnnnnnnnnnnnnnnnnnnnnnnnnnnnnnnnnnnnnnnnnnnnnnnnnnnnnnnnnnnnnnnnnnnnnnnnnnnnnnnnnnnnnnnnnnnnnnnnnnnnnnnnnnnnnnnnnnnnnnnnnnnnnnnnnnnnnnnnnnnnnnnnnnnnnnnnnnnnnnnnnnnnnnnnnnnnnnnnnnnnnnnnnnnnnnnnnnnnnnnnnnnnnnnnnnnnnnnnnnnnnnnnnnnnnnnnnnnnnnnnnnnnnnnnnnnnnnnnnnnnnnnnnnnnnnnnnnnnnnnnnnnnnnnnnnnnnnnnnnnnnnnnnnnnnnnnnnnnnnnnnnnnnnnnnnnnnnnnnnnnnnnnnnnnnnnnnnnnnnnnnnnnnnnnnnnnnnnnnnnnnnnnnnnnnnnnnnnnnnnnnnnnnnnnnnnnnnnnnnnnnnnnnnnnnnnnnnnnnnnnnnnnnnnnnnnnnnnnnnnnnnnnnnnnnnnnnnnnnnnnnnnnnnnnnnnnnnnnnnnnnnnnnnnnnnnnnnnnnnnnnnnnnnnnnnnnnnnnnnnnnnnnnnnnnnnnnnnnnnnnnnnnnnnnnnnnnnnnnnnnnnnnnnnnnnnnnnnnnnnnnnnnnnnnnnnnnnnnnnnnnnnnnnnnnnnnnnnnnnnnnnnnnnnnnnnnnnnnnnnnnnnnnnnnnnnnnnnnnnnnnnnnnnnnnnnnnnnnnnnnnnnnnnnnnnnnnnnnnnnnnnnnnnnnnnnnnnnnnnnnnnnnnnnnnnnnnnnnnnnnnnnnnnnnnnnnnnnnnnnnnnnnnnnnnnnnnnnnnnnnnnnnnnnnnnnnnnnnnnnnnnnnnnnnnnnnnnnnnnnnnnnnnnnnnnnnnnnnnnnnnnnnnnnnnnnnnnnnnnnnnnnnnnnnnnnnnnnnnnnnnnnnnnnnnnnnnnnnnnnnnnnnnnnnnnnnnnnnnnnnnnnnnnnnnnnnnnnnnnnnnnnnnnnnnnnnnnnnnnnnnnnnnnnnnnnnnnnnnnnnnnnnnnnnnnnnnnnnnnnnnnnnnnnnnnnnnnnnnnnnnnnnnnnnnnnnnnnnnnnnnnnnnnnnnnnnnnnnnnnnnnnnnnnnnnnnnnnnnnnnnnnnnnnnnnnnnnnnnnnnnnnnnnnnnnnnnnnnnnnnnnnnnnnnnnnnnnnnnnnnnnnnnnnnnnnnnnnnnnnnnnnnnnnnnnnnnnnnnnnnnnnnnnnnnnnnnnnnnnnnnnnnnnnnnnnnnnnnnnnnnnnnnnnnnnnnnnnnnnnnnnnnnnnnnnnnnnnnnnnnnnnnnnnnnnnnnnnnnnnnnnnnnnnnnnnnnnnnnnnnnnnnnnnnnnnnnnnnnnnnnnnnnnnnnnnnnnnnnnnnnnnnnnnnnnnnnnnnnnnnnnnnnnnnnnnnnnnnnnnnnnnnnnnnnnnnnnnnnnnnnnnnnnnnnnnnnnnnnnnnnnnnnnnnnnnnnnnnnnnnnnnnnnnnnnnnnnnnnnnnnnnnnnnnnnnnnnnnnnnnnnnnnnnnnnnnnnnnnnnnnnnnnnnnnnnnnnnnnnnnnnnnnnnnnnnnnnnnnnnnnnnnnnnnnnnnnnnnnnnnnnnnnnnnnnnnnnnnnnnnnnnnnnnnnnnnnnnnnnnnnnnnnnnnnnnnnnnnnnnnnnnnnnnnnnnnnnnnnnnnnnnnnnnnnnnnnnnnnnnnnnnnnnnnnnnnnnnnnnnnnnnnnnnnnnnnnnnnnnnnnnnnnnnnnnnnnnnnnnnnnnnnnnnnnnnnnnnnnnnnnnnnnnnnnnnnnnnnnnnnnnnnnnnnnnnnnnnnnnnnnnnnnnnnnnnnnnnnnnnnnnnnnnnnnnnnnnnnnnnnnnnnnnnnnnnnnnnnnnnnnnnnnnnnnnnnnnnnnnnnnnnnnnnnnnnnnnnnnnnnnnnnnnnnnnnnnnnnnnnnnnnnnnnnnnnnnnnnnnnnnnnnnnnnnnnnnnnnnnnnnnnnnnnnnnnnnnnnnnnnnnnnnnnnnnnnnnnnnnnnnnnnnnnnnnnnnnnnnnnnnnnnnnnnnnnnnnnnnnnnnnnnnnnnnnnnnnnnnnnnnnnnnnnnnnnnnnnnnnnnnnnnnnnnnnnnnnnnnnnnnnnnnnnnnnnnnnnnnnnnnnnnnnnnnnnnnnnnnnnnnnnnnnnnnnnnnnnnnnnnnnnnnnnnnnnnnnnnnnnnnnnnnnnnnnnnnnnnnnnnnnnnnnnnnnnnnnnnnnnnnnnnnnnnnnnnnnnnnnnnnnnnnnnnnnnnnnnnnnnnnnnnnnnnnnnnnnnnnnnnnnnnnnnnnnnnnnnnnnnnnnnnnnnnnnnnnnnnnnnnnnnnnnnnnnnnnnnnnnnnnnnnnnnnnnnnnnnnnnnnnnnnnnnnnnnnnnnnnnnnnnnnnnnnnnnnnnnnnnnnnnnnnnnnnnnnnnnnnnnnnnnnnnnnnnnnnnnnnnnnnnnnnnnnnnnnnnnnnnnnnnnnnnnnnnnnnnnnnnnnnnnnnnnnnnnnnnnnnnnnnnnnnnnnnnnnnnnnnnnnnnnnnnnnnnnnnnnnnnnnnnnnnnnnnnnnnnnnnnnnnnnnnnnnnnnnnnnnnnnnnnnnnnnnnnnnnnnnnnnnnnnnnnnnnnnnnnnnnnnnnnnnnnnnnnnnnnnnnnnnnnnnnnnnnnnnnnnnnnnnnnnnnnnnnnnnnnnnnnnnnnnnnnnnnnnnnnnnnnnnnnnnnnnnnnnnnnnnnnnnnnnnnnnnnnnnnnnnnnnnnnnnnnnnnnnnnnnnnnnnnnnnnnnnnnnnnnnnnnnnnnnnnnnnnnnnnnnnnnnnnnnnnnnnnnnnnnnnnnnnnnnnnnnnnnnnnnnnnnnnnnnnnnnnnnnnnnnnnnnnnnnnnnnnnnnnnnnnnnnnnnnnnnnnnnnnnnnnnnnnnnnnnnnnnnnnnnnnnnnnnnnnnnnnnnnnnnnnnnnnnnnnnnnnnnnnnnnnnnnnnnnnnnnnnnnnnnnnnnnnnnnnnnnnnnnnnnnnnnnnnnnnnnnnnnnnnnnnnnnnnnnnnnnnnnnnnnnnnnnnnnnnnnnnnnnnnnnnnnnnnnnnnnnnnnnnnnnnnnnnnnnnnnnnnnnnnnnnnnnnnnnnnnnnnnnnnnnnnnnnnnnnnnnnnnnnnnnnnnnnnnnnnnnnnnnnnnnnnnnnnnnnnnnnnnnnnnnnnnnnnnnnnnnnnnnnnnnnnnnnnnnnnnnnnnnnnnnnnnnnnnnnnnnnnnnnnnnnnnnnnnnnnnnnnnnnnnnnnnnnnnnnnnnnnnnnnnnnnnnnnnnnnnnnnnnnnnnnnnnnnnnnnnnnnnnnnnnnnnnnnnnnnnnnnnnnnnnnnnnnnnnnnnnnnnnnnnnnnnnnnnnnnnnnnnnnnnnnnnnnnnnnnnnnnnnnnnnnnnnnnnnnnnnnnnnnnnnnnnnnnnnnnnnnnnnnnnnnnnnnnnnnnnnnnnnnnnnnnnnnnnnnnnnnnnnnnnnnnnnnnnnnnnnnnnnnnnnnnnnnnnnnnnnnnnnnnnnnnnnnnnnnnnnnnnnnnnnnnnnnnnnnnnnnnnnnnnnnnnnnnnnnnnnnnnnnnnnnnnnnnnnnnnnnnnnnnnnnnnnnnnnnnnnnnnnnnnnnnnnnnnnnnnnnnnnnnnnnnnnnnnnnnnnnnnnnnnnnnnnnnnnnnnnnnnnnnnnnnnnnnnnnnnnnnnnnnnnnnnnnnnnnnnnnnnnnnnnnnnnnnnnnnnnnnnnnnnnnnnnnnnnnnnnnnnnnnnnnnnnnnnnnnnnnnnnnnnnnnnnnnnnnnnnnnnnnnnnnnnnnnnnnnnnnnnnnnnnnnnnnnnnnnnnnnnnnnnnnnnnnnnnnnnnnnnnnnnnnnnnnnnnnnnnnnnnnnnnnnnnnnnnnnnnnnnnnnnnnnnnnnnnnnnnnnnnnnnnnnnnnnnnnnnnnnnnnnnnnnnnnnnnnnnnnnnnnnnnnnnnnnnnnnnnnnnnnnnnnnnnnnnnnnnnnnnnnnnnnnnnnnnnnnnnnnnnnnnnnnnnnnnnnnnnnnnnnnnnnnnnnnnnnnnnnnnnnnnnnnnnnnnnnnnnnnnnnnnnnnnnnnnnnnnnnnnnnnnnnnnnnnnnnnnnnnnnnnnnnnnnnnnnnnnnnnnnnnnnnnnnnnnnnnnnnnnnnnnnnnnnnnnnnnnnnnnnnnnnnnnnnnnnnnnnnnnnnnnnnnnnnnnnnnnnnnnnnnnnnnnnnnnnnnnnnnnnnnnnnnnnnnnnnnnnnnnnnnnnnnnnnnnnnnnnnnnnnnnnnnnnnnnnnnnnnnnnnnnnnnnnnnnnnnnnnnnnnnnnnnnnnnnnnnnnnnnnnnnnnnnnnnnnnnnnnnnnnnnnnnnnnnnnnnnnnnnnnnnnnnnnnnnnnnnnnnnnnnnnnnnnnnnnnnnnnnnnnnnnnnnnnnnnnnnnnnnnnnnnnnnnnnnnnnnnnnnnnnnnnnnnnnnnnnnnnnnnnnnnnnnnnnnnnnnnnnnnnnnnnnnnnnnnnnnnnnnnnnnnnnnnnnnnnnnnnnnnnnnnnnnnnnnnnnnnnnnnnnnnnnnnnnnnnnnnnnnnnnnnnnnnnnnnnnnnnnnnnnnnnnnnnnnnnnnnnnnnnnnnnnnnnnnnnnnnnnnnnnnnnnnnnnnnnnnnnnnnnnnnnnnnnnnnnnnnnnnnnnnnnnnnnnnnnnnnnnnnnnnnnnnnnnnnnnnnnnnnnnnnnnnnnnnnnnnnnnnnnnnnnnnnnnnnnnnnnnnnnnnnnnnnnnnnnnnnnnnnnnnnnnnnnnnnnnnnnnnnnnnnnnnnnnnnnnnnnnnnnnnnnnnnnnnnnnnnnnnnnnnnnnnnnnnnnnnnnnnnnnnnnnnnnnnnnnnnnnnnnnnnnnnnnnnnnnnnnnnnnnnnnnnnnnnnnnnnnnnnnnnnnnnnnnnnnnnnnnnnnnnnnnnnnnnnnnnnnnnnnnnnnnnnnnnnnnnnnnnnnnnnnnnnnnnnnnnnnnnnnnnnnnnnnnnnnnnnnnnnnnnnnnnnnnnnnnnnnnnnnnnnnnnnnnnnnnnnnnnnnnnnnnnnnnnnnnnnnnnnnnnnnnnnnnnnnnnnnnnnnnnnnnnnnnnnnnnnnnnnnnnnnnnnnnnnnnnnnnnnnnnnnnnnnnnnnnnnnnnnnnnnnnnnnnnnnnnnnnnnnnnnnnnnnnnnnnnnnnnnnnnnnnnnnnnnnnnnnnnnnnnnnnnnnnnnnnnnnnnnnnnnnnnnnnnnnnnnnnnnnnnnnnnnnnnnnnnnnnnnnnnnnnnnnnnnnnnnnnnnnnnnnnnnnnnnnnnnnnnnnnnnnnnnnnnnnnnnnnnnnnnnnnnnnnnnnnnnnnnnnnnnnnnnnnnnnnnnnnnnnnnnnnnnnnnnnnnnnnnnnnnnnnnnnnnnnnnnnnnnnnnnnnnnnnnnnnnnnnnnnnnnnnnnnnnnnnnnnnnnnnnnnnnnnnnnnnnnnnnnnnnnnnnnnnnnnnnnnnnnnnnnnnnnnnnnnnnnnnnnnnnnnnnnnnnnnnnnnnnnnnnnnnnnnnnnnnnnnnnnnnnnnnnnnnnnnnnnnnnnnnnnnnnnnnnnnnnnnnnnnnnnnnnnnnnnnnnnnnnnnnnnnnnnnnnnnnnnnnnnnnnnnnnnnnnnnnnnnnnnnnnnnnnnnnnnnnnnnnnnnnnnnnnnnnnnnnnnnnnnnnnnnnnnnnnnnnnnnnnnnnnnnnnnnnnnnnnnnnnnnnnnnnnnnnnnnnnnnnnnnnnnnnnnnnnnnnnnnnnnnnnnnnnnnnnnnnnnnnnnnnnnnnnnnnnnnnnnnnnnnnnnnnnnnnnnnnnnnnnnnnnnnnnnnnnnnnnnnnnnnnnnnnnnnnnnnnnnnnnnnnnnnnnnnnnnnnnnnnnnnnnnnnnnnnnnnnnnnnnnnnnnnnnnnnnnnnnnnnnnnnnnnnnnnnnnnnnnnnnnnnnnnnnnnnnnnnnnnnnnnnnnnnnnnnnnnnnnnnnnnnnnnnnnnnnnnnnnnnnnnnnnnnnnnnnnnnnnnnnnnnnnnnnnnnnnnnnnnnnnnnnnnnnnnnnnnnnnnnnnnnnnnnnnnnnnnnnnnnnnnnnnnnnnnnnnnnnnnnnnnnnnnnnnnnnnnnnnnnnnnnnnnnnnnnnnnnnnnnnnnnnnnnnnnnnnnnnnnnnnnnnnnnnnnnnnnnnnnnnnnnnnnnnnnnnnnnnnnnnnnnnnnnnnnnnnnnnnnnnnnnnnnnnnnnnnnnnnnnnnnnnnnnnnnnnnnnnnnnnnnnnnnnnnnnnnnnnnnnnnnnnnnnnnnnnnnnnnnnnnnnnnnnnnnnnnnnnnnnnnnnnnnnnnnnnnnnnnnnnnnnnnnnnnnnnnnnnnnnnnnnnnnnnnnnnnnnnnnnnnnnnnnnnnnnnnnnnnnnnnnnnnnnnnnnnnnnnnnnnnnnnnnnnnnnnnnnnnnnnnnnnnnnnnnnnnnnnnnnnnnnnnnnnnnnnnnnnnnnnnnnnnnnnnnnnnnnnnnnnnnnnnnnnnnnnnnnnnnnnnnnnnnnnnnnnnnnnnnnnnnnnnnnnnnnnnnnnnnnnnnnnnnnnnnnnnnnnnnnnnnnnnnnnnnnnnnnnnnnnnnnnnnnnnnnnnnnnnnnnnnnnnnnnnnnnnnnnnnnnnnnnnnnnnnnnnnnnnnnnnnnnnnnnnnnnnnnnnnnnnnnnnnnnnnnnnnnnnnnnnnnnnnnnnnnnnnnnnnnnnnnnnnnnnnnnnnnnnnnnnnnnnnnnnnnnnnnnnnnnnnnnnnnnnnnnnnnnnnnnnnnnnnnnnnnnnnnnnnnnnnnnnnnnnnnnnnnnnnnnnnnnnnnnnnnnnnnnnnnnnnnnnnnnnnnnnnnnnnnnnnnnnnnnnnnnnnnnnnnnnnnnnnnnnnnnnnnnnnnnnnnnnnnnnnnnnnnnnnnnnnnnnnnnnnnnnnnnnnnnnnnnnnnnnnnnnnnnnnnnnnnnnnnnnnnnnnnnnnnnnnnnnnnnnnnnnnnnnnnnnnnnnnnnnnnnnnnnnnnnnnnnnnnnnnnnnnnnnnnnnnnnnnnnnnnnnnnnnnnnnnnnnnnnnnnnnnnnnnnnnnnnnnnnnnnnnnnnnnnnnnnnnnnnnnnnnnnnnnnnnnnnnnnnnnnnnnnnnnnnnnnnnnnnnnnnnnnnnnnnnnnnnnnnnnnnnnnnnnnnnnnnnnnnnnnnnnnnnnnnnnnnnnnnnnnnnnnnnnnnnnnnnnnnnnnnnnnnnnnnnnnnnnnnnnnnnnnnnnnnnnnnnnnnnnnnnnnnnnnnnnnnnnnnnnnnnnnnnnnnnnnnnnnnnnnnnnnnnnnnnnnnnnnnnnnnnnnnnnnnnnnnnnnnnnnnnnnnnnnnnnnnnnnnnnnnnnnnnnnnnnnnnnnnnnnnnnnnnnnnnnnnnnnnnnnnnnnnnnnnnnnnnnnnnnnnnnnnnnnnnnnnnnnnnnnnnnnnnnnnnnnnnnnnnnnnnnnnnnnnnnnnnnnnnnnnnnnnnnnnnnnnnnnnnnnnnnnnnnnnnnnnnnnnnnnnnnnnnnnnnnnnnnnnnnnnnnnnnnnnnnnnnnnnnnnnnnnnnnnnnnnnnnnnnnnnnnnnnnnnnnnnnnnnnnnnnnnnnnnnnnnnnnnnnnnnnnnnnnnnnnnnnnnnnnnnnnnnnnnnnnnnnnnnnnnnnnnnnnnnnnnnnnnnnnnnnnnnnnnnnnnnnnnnnnnnnnnnnnnnnnnnnnnnnnnnnnnnnnnnnnnnnnnnnnnnnnnnnnnnnnnnnnnnnnnnnnnnnnnnnnnnnnnnnnnnnnnnnnnnnnnnnnnnnnnnnnnnnnnnnnnnnnnnnnnnnnnnnnnnnnnnnnnnnnnnnnnnnnnnnnnnnnnnnnnnnnnnnnnnnnnnnnnnnnnnnnnnnnnnnnnnnnnnnnnnnnnnnnnnnnnnnnnnnnnnnnnnnnnnnnnnnnnnnnnnnnnnnnnnnnnnnnnnnnnnnnnnnnnnnnnnnnnnnnnnnnnnnnnnnnnnnnnnnnnnnnnnnnnnnnnnnnnnnnnnnnnnnnnnnnnnnnnnnnnnnnnnnnnnnnnnnnnnnnnnnnnnnnnnnnnnnnnnnnnnnnnnnnnnnnnnnnnnnnnnnnnnnnnnnnnnnnnnnnnnnnnnnnnnnnnnnnnnnnnnnnnnnnnnnnnnnnnnnnnnnnnnnnnnnnnnnnnnnnnnnnnnnnnnnnnnnnnnnnnnnnnnnnnnnnnnnnnnnnnnnnnnnnnnnnnnnnnnnnnnnnnnnnnnnnnnnnnnnnnnnnnnnnnnnnnnnnnnnnnnnnnnnnnnnnnnnnnnnnnnnnnnnnnnnnnnnnnnnnnnnnnnnnnnnnnnnnnnnnnnnnnnnnnnnnnnnnnnnnnnnnnnnnnnnnnnnnnnnnnnnnnnnnnnnnnnnnnnnnnnnnnnnnnnnnnnnnnnnnnnnnnnnnnnnnnnnnnnnnnnnnnnnnnnnnnnnnnnnnnnnnnnnnnnnnnnnnnnnnnnnnnnnnnnnnnnnnnnnnnnnnnnnnnnnnnnnnnnnnnnnnnnnnnnnnnnnnnnnnnnnnnnnnnnnnnnnnnnnnnnnnnnnnnnnnnnnnnnnnnnnnnnnnnnnnnnnnnnnnnnnnnnnnnnnnnnnnnnnnnnnnnnnnnnnnnnnnnnnnnnnnnnnnnnnnnnnnnnnnnnnnnnnnnnnnnnnnnnnnnnnnnnnnnnnnnnnnnnnnnnnnnnnnnnnnnnnnnnnnnnnnnnnnnnnnnnnnnnnnnnnnnnnnnnnnnnnnnnnnnnnnnnnnnnnnnnnnnnnnnnnnnnnnnnnnnnnnnnnnnnnnnnnnnnnnnnnnnnnnnnnnnnnnnnnnnnnnnnnnnnnnnnnnnnnnnnnnnnnnnnnnnnnnnnnnnnnnnnnnnnnnnnnnnnnnnnnnnnnnnnnnnnnnnnnnnnnnnnnnnnnnnnnnnnnnnnnnnnnnnnnnnnnnnnnnnnnnnnnnnnnnnnnnnnnnnnnnnnnnnnnnnnnnnnnnnnnnnnnnnnnnnnnnnnnnnnnnnnnnnnnnnnnnnnnnnnnnnnnnnnnnnnnnnnnnnnnnnnnnnnnnnnnnnnnnnnnnnnnnnnnnnnnnnnnnnnnnnnnnnnnnnnnnnnnnnnnnnnnnnnnnnnnnnnnnnnnnnnnnnnnnnnnnnnnnnnnnnnnnnnnnnnnnnnnnnnnnnnnnnnnnnnnnnnnnnnnnnnnnnnnnnnnnnnnnnnnnnnnnnnnnnnnnnnnnnnnnnnnnnnnnnnnnnnnnnnnnnnnnnnnnnnnnnnnnnnnnnnnnnnnnnnnnnnnnnnnnnnnnnnnnnnnnnnnnnnnnnnnnnnnnnnnnnnnnnnnnnnnnnnnnnnnnnnnnnnnnnnnnnnnnnnnnnnnnnnnnnnnnnnnnnnnnnnnnnnnnnnnnnnnnnnnnnnnnnnnnnnnnnnnnnnnnnnnnnnnnnnnnnnnnnnnnnnnnnnnnnnnnnnnnnnnnnnnnnnnnnnnnnnnnnnnnnnnnnnnnnnnnnnnnnnnnnnnnnnnnnnnnnnnnnnnnnnnnnnnnnnnnnnnnnnnnnnnnnnnnnnnnnnnnnnnnnnnnnnnnnnnnnnnnnnnnnnnnnnnnnnnnnnnnnnnnnnnnnnnnnnnnnnnnnnnnnnnnnnnnnnnnnnnnnnnnnnnnnnnnnnnnnnnnnnnnnnnnnnnnnnnnnnnnnnnnnnnnnnnnnnnnnnnnnnnnnnnnnnnnnnnnnnnnnnnnnnnnnnnnnnnnnnnnnnnnnnnnnnnnnnnnnnnnnnnnnnnnnnnnnnnnnnnnnnnnnnnnnnnnnnnnnnnnnnnnnnnnnnnnnnnnnnnnnnnnnnnnnnnnnnnnnnnnnnnnnnnnnnnnnnnnnnnnnnnnnnnnnnnnnnnnnnnnnnnnnnnnnnnnnnnnnnnnnnnnnnnnnnnnnnnnnnnnnnnnnnnnnnnnnnnnnnnnnnnnnnnnnnnnnnnnnnnnnnnnnnnnnnnnnnnnnnnnnnnnnnnnnnnnnnnnnnnnnnnnnnnnnnnnnnnnnnnnnnnnnnnnnnnnnnnnnnnnnnnnnnnnnnnnnnnnnnnnnnnnnnnnnnnnnnnnnnnnnnnnnnnnnnnnnnnnnnnnnnnnnnnnnnnnnnnnnnnnnnnnnnnnnnnnnnnnnnnnnnnnnnnnnnnnnnnnnnnnnnnnnnnnnnnnnnnnnnnnnnnnnnnnnnnnnnnnnnnnnnnnnnnnnnnnnnnnnnnnnnnnnnnnnnnnnnnnnnnnnnnnnnnnnnnnnnnnnnnnnnnnnnnnnnnnnnnnnnnnnnnnnnnnnnnnnnnnnnnnnnnnnnnnnnnnnnnnnnnnnnnnnnnnnnnnnnnnnnnnnnnnnnnnnnnnnnnnnnnnnnnnnnnnnnnnnnnnnnnnnnnnnnnnnnnnnnnnnnnnnnnnnnnnnnnnnnnnnnnnnnnnnnnnnnnnnnnnnnnnnnnnnnnnnnnnnnnnnnnnnnnnnnnnnnnnnnnnnnnnnnnnnnnnnnnnnnnnnnnnnnnnnnnnnnnnnnnnnnnnnnnnnnnnnnnnnnnnnnnnnnnnnnnnnnnnnnnnnnnnnnnnnnnnnnnnnnnnnnnnnnnnnnnnnnnnnnnnnnnnnnnnnnnnnnnnnnnnnnnnnnnnnnnnnnnnnnnnnnnnnnnnnnnnnnnnnnnnnnnnnnnnnnnnnnnnnnnnnnnnnnnnnnnnnnnnnnnnnnnnnnnnnnnnnnnnnnnnnnnnnnnnnnnnnnnnnnnnnnnnnnnnnnnnnnnnnnnnnnnnnnnnnnnnnnnnnnnnnnnnnnnnnnnnnnnnnnnnnnnnnnnnnnnnnnnnnnnnnnnnnnnnnnnnnnnnnnnnnnnnnnnnnnnnnnnnnnnnnnnnnnnnnnnnnnnnnnnnnnnnnnnnnnnnnnnnnnnnnnnnnnnnnnnnnnnnnnnnnnnnnnnnnnnnnnnnnnnnnnnnnnnnnnnnnnnnnnnnnnnnnnnnnnnnnnnnnnnnnnnnnnnnnnnnnnnnnnnnnnnnnnnnnnnnnnnnnnnnnnnnnnnnnnnnnnnnnnnnnnnnnnnnnnnnnnnnnnnnnnnnnnnnnnnnnnnnnnnnnnnnnnnnnnnnnnnnnnnnnnnnnnnnnnnnnnnnnnnnnnnnnnnnnnnnnnnnnnnnnnnnnnnnnnnnnnnnnnnnnnnnnnnnnnnnnnnnnnnnnnnnnnnnnnnnnnnnnnnnnnnnnnnnnnnnnnnnnnnnnnnnnnnnnnnnnnnnnnnnnnnnnnnnnnnnnnnnnnnnnnnnnnnnnnnnnnnnnnnnnnnnnnnnnnnnnnnnnnnnnnnnnnnnnnnnnnnnnnnnnnnnnnnnnnnnnnnnnnnnnnnnnnnnnnnnnnnnnnnnnnnnnnnnnnnnnnnnnnnnnnnnnnnnnnnnnnnnnnnnnnnnnnnnnnnnnnnnnnnnnnnnnnnnnnnnnnnnnnnnnnnnnnnnnnnnnnnnnnnnnnnnnnnnnnnnnnnnnnnnnnnnnnnnnnnnnnnnnnnnnnnnnnnnnnnnnnnnnnnnnnnnnnnnnnnnnnnnnnnnnnnnnnnnnnnnnnnnnnnnnnnnnnnnnnnnnnnnnnnnnnnnnnnnnnnnnnnnnnnnnnnnnnnnnnnnnnnnnnnnnnnnnnnnnnnnnnnnnnnnnnnnnnnnnnnnnnnnnnnnnnnnnnnnnnnnnnnnnnnnnnnnnnnnnnnnnnnnnnnnnnnnnnnnnnnnnnnnnnnnnnnnnnnnnnnnnnnnnnnnnnnnnnnnnnnnnnnnnnnnnnnnnnnnnnnnnnnnnnnnnnnnnnnnnnnnnnnnnnnnnnnnnnnnnnnnnnnnnnnnnnnnnnnnnnnnnnnnnnnnnnnnnnnnnnnnnnnnnnnnnnnnnnnnnnnnnnnnnnnnnnnnnnnnnnnnnnnnnnnnnnnnnnnnnnnnnnnnnnnnnnnnnnnnnnnnnnnnnnnnnnnnnnnnnnnnnnnnnnnnnnnnnnnnnnnnnnnnnnnnnnnnnnnnnnnnnnnnnnnnnnnnnnnnnnnnnnnnnnnnnnnnnnnnnnnnnnnnnnnnnnnnnnnnnnnnnnnnnnnnnnnnnnnnnnnnnnnnnnnnnnnnnnnnnnnnnnnnnnnnnnnnnnnnnnnnnnnnnnnnnnnnnnnnnnnnnnnnnnnnnnnnnnnnnnnnnnnnnnnnnnnnnnnnnnnnnnnnnnnnnnnnnnnnnnnnnnnnnnnnnnnnnnnnnnnnnnnnnnnnnnnnnnnnnnnnnnnnnnnnnnnnnnnnnnnnnnnnnnnnnnnnnnnnnnnnnnnnnnnnnnnnnnnnnnnnnnnnnnnnnnnnnnnnnnnnnnnnnnnnnnnnnnnnnnnnnnnnnnnnnnnnnnnnnnnnnnnnnnnnnnnnnnnnnnnnnnnnnnnnnnnnnnnnnnnnnnnnnnnnnnnnnnnnnnnnnnnnnnnnnnnnnnnnnnnnnnnnnnnnnnnnnnnnnnnnnnnnnnnnnnnnnnnnnnnnnnnnnnnnnnnnnnnnnnnnnnnnnnnnnnnnnnnnnnnnnnnnnnnnnnnnnnnnnnnnnnnnnnnnnnnnnnnnnnnnnnnnnnnnnnnnnnnnnnnnnnnnnnnnnnnnnnnnnnnnnnnnnnnnnnnnnnnnnnnnnnnnnnnnnnnnnnnnnnnnnnnnnnnnnnnnnnnnnnnnnnnnnnnnnnnnnnnnnnnnnnnnnnnnnnnnnnnnnnnnnnnnnnnnnnnnnnnnnnnnnnnnnnnnnnnnnnnnnnnnnnnnnnnnnnnnnnnnnnnnnnnnnnnnnnnnnnnnnnnnnnnnnnnnnnnnnnnnnnnnnnnnnnnnnnnnnnnnnnnnnnnnnnnnnnnnnnnnnnnnnnnnnnnnnnnnnnnnnnnnnnnnnnnnnnnnnnnnnnnnnnnnnnnnnnnnnnnnnnnnnnnnnnnnnnnnnnnnnnnnnnnnnnnnnnnnnnnnnnnnnnnnnnnnnnnnnnnnnnnnnnnnnnnnnnnnnnnnnnnnnnnnnnnnnnnnnnnnnnnnnnnnnnnnnnnnnnnnnnnnnnnnnnnnnnnnnnnnnnnnnnnnnnnnnnnnnnnnnnnnnnnnnnnnnnnnnnnnnnnnnnnnnnnnnnnnnnnnnnnnnnnnnnnnnnnnnnnnnnnnnnnnnnnnnnnnnnnnnnnnnnnnnnnnnnnnnnnnnnnnnnnnnnnnnnnnnnnnnnnnnnnnnnnnnnnnnnnnnnnnnnnnnnnnnnnnnnnnnnnnnnnnnnnnnnnnnnnnnnnnnnnnnnnnnnnnnnnnnnnnnnnnnnnnnnnnnnnnnnnnnnnnnnnnnnnnnnnnnnnnnnnnnnnnnnnnnnnnnnnnnnnnnnnnnnnnnnnnnnnnnnnnnnnnnnnnnnnnnnnnnnnnnnnnnnnnnnnnnnnnnnnnnnnnnnnnnnnnnnnnnnnnnnnnnnnnnnnnnnnnnnnnnnnnnnnnnnnnnnnnnnnnnnnnnnnnnnnnnnnnnnnnnnnnnnnnnnnnnnnnnnnnnnnnnnnnnnnnnnnnnnnnnnnnnnnnnnnnnnnnnnnnnnnnnnnnnnnnnnnnnnnnnnnnnnnnnnnnnnnnnnnnnnnnnnnnnnnnnnnnnnnnnnnnnnnnnnnnnnnnnnnnnnnnnnnnnnnnnnnnnnnnnnnnnnnnnnnnnnnnnnnnnnnnnnnnnnnnnnnnnnnnnnnnnnnnnnnnnnnnnnnnnnnnnnnnnnnnnnnnnnnnnnnnnnnnnnnnnnnnnnnnnnnnnnnnnnnnnnnnnnnnnnnnnnnnnnnnnnnnnnnnnnnnnnnnnnnnnnnnnnnnnnnnnnnnnnnnnnnnnnnnnnnnnnnnnnnnnnnnnnnnnnnnnnnnnnnnnnnnnnnnnnnnnnnnnnnnnnnnnnnnnnnnnnnnnnnnnnnnnnnnnnnnnnnnnnnnnnnnnnnnnnnnnnnnnnnnnnnnnnnnnnnnnnnnnnnnnnnnnnnnnnnnnnnnnnnnnnnnnnnnnnnnnnnnnnnnnnnnnnnnnnnnnnnnnnnnnnnnnnnnnnnnnnnnnnnnnnnnnnnnnnnnnnnnnnnnnnnnnnnnnnnnnnnnnnnnnnnnnnnnnnnnnnnnnnnnnnnnnnnnnnnnnnnnnnnnnnnnnnnnnnnnnnnnnnnnnnnnnnnnnnnnnnnnnnnnnnnnnnnnnnnnnnnnnnnnnnnnnnnnnnnnnnnnnnnnnnnnnnnnnnnnnnnnnnnnnnnnnnnnnnnnnnnnnnnnnnnnnnnnnnnnnnnnnnnnnnnnnnnnnnnnnnnnnnnnnnnnnnnnnnnnnnnnnnnnnnnnnnnnnnnnnnnnnnnnnnnnnnnnnnnnnnnnnnnnnnnnnnnnnnnnnnnnnnnnnnnnnnnnnnnnnnnnnnnnnnnnnnnnnnnnnnnnnnnnnnnnnnnnnnnnnnnnnnnnnnnnnnnnnnnnnnnnnnnnnnnnnnnnnnnnnnnnnnnnnnnnnnnnnnnnnnnnnnnnnnnnnnnnnnnnnnnnnnnnnnnnnnnnnnnnnnnnnnnnnnnnnnnnnnnnnnnnnnnnnnnnnnnnnnnnnnnnnnnnnnnnnnnnnnnnnnnnnnnnnnnnnnnnnnnnnnnnnnnnnnnnnnnnnnnnnnnnnnnnnnnnnnnnnnnnnnnnnnnnnnnnnnnnnnnnnnnnnnnnnnnnnnnnnnnnnnnnnnnnnnnnnnnnnnnnnnnnnnnnnnnnnnnnnnnnnnnnnnnnnnnnnnnnnnnnnnnnnnnnnnnnnnnnnnnnnnnnnnnnnnnnnnnnnnnnnnnnnnnnnnnnnnnnnnnnnnnnnnnnnnnnnnnnnnnnnnnnnnnnnnnnnnnnnnnnnnnnnnnnnnnnnnnnnnnnnnnnnnnnnnnnnnnnnnnnnnnnnnnnnnnnnnnnnnnnnnnnnnnnnnnnnnnnnnnnnnnnnnnnnnnnnnnnnnnnnnnnnnnnnnnnnnnnnnnnnnnnnnnnnnnnnnnnnnnnnnnnnnnnnnnnnnnnnnnnnnnnnnnnnnnnnnnnnnnnnnnnnnnnnnnnnnnnnnnnnnnnnnnnnnnnnnnnnnnnnnnnnnnnnnnnnnnnnnnnnnnnnnnnnnnnnnnnnnnnnnnnnnnnnnnnnnnnnnnnnnnnnnnnnnnnnnnnnnnnnnnnnnnnnnnnnnnnnnnnnnnnnnnnnnnnnnnnnnnnnnnnnnnnnnnnnnnnnnnnnnnnnnnnnnnnnnnnnnnnnnnnnnnnnnnnnnnnnnnnnnnnnnnnnnnnnnnnnnnnnnnnnnnnnnnnnnnnnnnnnnnnnnnnnnnnnnnnnnnnnnnnnnnnnnnnnnnnnnnnnnnnnnnnnnnnnnnnnnnnnnnnnnnnnnnnnnnnnnnnnnnnnnnnnnnnnnnnnnnnnnnnnnnnnnnnnnnnnnnnnnnnnnnnnnnnnnnnnnnnnnnnnnnnnnnnnnnnnnnnnnnnnnnnnnnnnnnnnnnnnnnnnnnnnnnnnnnnnnnnnnnnnnnnnnnnnnnnnnnnnnnnnnnnnnnnnnnnnnnnnnnnnnnnnnnnnnnnnnnnnnnnnnnnnnnnnnnnnnnnnnnnnnnnnnnnnnnnnnnnnnnnnnnnnnnnnnnnnnnnnnnnnnnnnnnnnnnnnnnnnnnnnnnnnnnnnnnnnnnnnnnnnnnnnnnnnnnnnnnnnnnnnnnnnnnnnnnnnnnnnnnnnnnnnnnnnnnnnnnnnnnnnnnnnnnnnnnnnnnnnnnnnnnnnnnnnnnnnnnnnnnnnnnnnnnnnnnnnnnnnnnnnnnnnnnnnnnnnnnnnnnnnnnnnnnnnnnnnnnnnnnnnnnnnnnnnnnnnnnnnnnnnnnnnnnnnnnnnnnnnnnnnnnnnnnnnnnnnnnnnnnnnnnnnnnnnnnnnnnnnnnnnnnnnnnnnnnnnnnnnnnnnnnnnnnnnnnnnnnnnnnnnnnnnnnnnnnnnnnnnnnnnnnnnnnnnnnnnnnnnnnnnnnnnnnnnnnnnnnnnnnnnnnnnnnnnnnnnnnnnnnnnnnnnnnnnnnnnnnnnnnnnnnnnnnnnnnnnnnnnnnnnnnnnnnnnnnnnnnnnnnnnnnnnnnnnnnnnnnnnnnnnnnnnnnnnnnnnnnnnnnnnnnnnnnnnnnnnnnnnnnnnnnnnnnnnnnnnnnnnnnnnnnnnnnnnnnnnnnnnnnnnnnnnnnnnnnnnnnnnnnnnnnnnnnnnnnnnnnnnnnnnnnnnnnnnnnnnnnnnnnnnnnnnnnnnnnnnnnnnnnnnnnnnnnnnnnnnnnnnnnnnnnnnnnnnnnnnnnnnnnnnnnnnnnnnnnnnnnnnnnnnnnnnnnnnnnnnnnnnnnnnnnnnnnnnnnnnnnnnnnnnnnnnnnnnnnnnnnnnnnnnnnnnnnnnnnnnnnnnnnnnnnnnnnnnnnnnnnnnnnnnnnnnnnnnnnnnnnnnnnnnnnnnnnnnnnnnnnnnnnnnnnnnnnnnnnnnnnnnnnnnnnnnnnnnnnnnnnnnnnnnnnnnnnnnnnnnnnnnnnnnnnnnnnnnnnnnnnnnnnnnnnnnnnnnnnnnnnnnnnnnnnnnnnnnnnnnnnnnnnnnnnnnnnnnnnnnnnnnnnnnnnnnnnnnnnnnnnnnnnnnnnnnnnnnnnnnnnnnnnnnnnnnnnnnnnnnnnnnnnnnnnnnnnnnnnnnnnnnnnnnnnnnnnnnnnnnnnnnnnnnnnnnnnnnnnnnnnnnnnnnnnnnnnnnnnnnnnnnnnnnnnnnnnnnnnnnnnnnnnnnnnnnnnnnnnnnnnnnnnnnnnnnnnnnnnnnnnnnnnnnnnnnnnnnnnnnnnnnnnnnnnnnnnnnnnnnnnnnnnnnnnnnnnnnnnnnnnnnnnnnnnnnnnnnnnnnnnnnnnnnnnnnnnnnnnnnnnnnnnnnnnnnnnnnnnnnnnnnnnnnnnnnnnnnnnnnnnnnnnnnnnnnnnnnnnnnnnnnnnnnnnnnnnnnnnnnnnnnnnnnnnnnnnnnnnnnnnnnnnnnnnnnnnnnnnnnnnnnnnnnnnnnnnnnnnnnnnnnnnnnnnnnnnnnnnnnnnnnnnnnnnnnnnnnnnnnnnnnnnnnnnnnnnnnnnnnnnnnnnnnnnnnnnnnnnnnnnnnnnnnnnnnnnnnnnnnnnnnnnnnnnnnnnnnnnnnnnnnnnnnnnnnnnnnnnnnnnnnnnnnnnnnnnnnnnnnnnnnnnnnnnnnnnnnnnnnnnnnnnnnnnnnnnnnnnnnnnnnnnnnnnnnnnnnnnnnnnnnnnnnnnnnnnnnnnnnnnnnnnnnnnnnnnnnnnnnnnnnnnnnnnnnnnnnnnnnnnnnnnnnnnnnnnnnnnnnnnnnnnnnnnnnnnnnnnnnnnnnnnnnnnnnnnnnnnnnnnnnnnnnnnnnnnnnnnnnnnnnnnnnnnnnnnnnnnnnnnnnnnnnnnnnnnnnnnnnnnnnnnnnnnnnnnnnnnnnnnnnnnnnnnnnnnnnnnnnnnnnnnnnnnnnnnnnnnnnnnnnnnnnnnnnnnnnnnnnnnnnnnnnnnnnnnnnnnnnnnnnnnnnnnnnnnnnnnnnnnnnnnnnnnnnnnnnnnnnnnnnnnnnnnnnnnnnnnnnnnnnnnnnnnnnnnnnnnnnnnnnnnnnnnnnnnnnnnnnnnnnnnnnnnnnnnnnnnnnnnnnnnnnnnnnnnnnnnnnnnnnnnnnnnnnnnnnnnnnnnnnnnnnnnnnnnnnnnnnnnnnnnnnnnnnnnnnnnnnnnnnnnnnnnnnnnnnnnnnnnnnnnnnnnnnnnnnnnnnnnnnnnnnnnnnnnnnnnnnnnnnnnnnnnnnnnnnnnnnnnnnnnnnnnnnnnnnnnnnnnnnnnnnnnnnnnnnnnnnnnnnnnnnnnnnnnnnnnnnnnnnnnnnnnnnnnnnnnnnnnnnnnnnnnnnnnnnnnnnnnnnnnnnnnnnnnnnnnnnnnnnnnnnnnnnnnnnnnnnnnnnnnnnnnnnnnnnnnnnnnnnnnnnnnnnnnnnnnnnnnnnnnnnnnnnnnnnnnnnnnnnnnnnnnnnnnnnnnnnnnnnnnnnnnnnnnnnnnnnnnnnnnnnnnnnnnnnnnnnnnnnnnnnnnnnnnnnnnnnnnnnnnnnnnnnnnnnnnnnnnnnnnnnnnnnnnnnnnnnnnnnnnnnnnnnnnnnnnnnnnnnnnnnnnnnnnnnnnnnnnnnnnnnnnnnnnnnnnnnnnnnnnnnnnnnnnnnnnnnnnnnnnnnnnnnnnnnnnnnnnnnnnnnnnnnnnnnnnnnnnnnnnnnnnnnnnnnnnnnnnnnnnnnnnnnnnnnnnnnnnnnnnnnnnnnnnnnnnnnnnnnnnnnnnnnnnnnnnnnnnnnnnnnnnnnnnnnnnnnnnnnnnnnnnnnnnnnnnnnnnnnnnnnnnnnnnnnnnnnnnnnnnnnnnnnnnnnnnnnnnnnnnnnnnnnnnnnnnnnnnnnnnnnnnnnnnnnnnnnnnnnnnnnnnnnnnnnnnnnnnnnnnnnnnnnnnnnnnnnnnnnnnnnnnnnnnnnnnnnnnnnnnnnnnnnnnnnnnnnnnnnnnnnnnnnnnnnnnnnnnnnnnnnnnnnnnnnnnnnnnnnnnnnnnnnnnnnnnnnnnnnnnnnnnnnnnnnnnnnnnnnnnnnnnnnnnnnnnnnnnnnnnnnnnnnnnnnnnnnnnnnnnnnnnnnnnnnnnnnnnnnnnnnnnnnnnnnnnnnnnnnnnnnnnnnnnnnnnnnnnnnnnnnnnnnnnnnnnnnnnnnnnnnnnnnnnnnnnnnnnnnnnnnnnnnnnnnnnnnnnnnnnnnnnnnnnnnnnnnnnnnnnnnnnnnnnnnnnnnnnnnnnnnnnnnnnnnnnnnnnnnnnnnnnnnnnnnnnnnnnnnnnnnnnnnnnnnnnnnnnnnnnnnnnnnnnnnnnnnnnnnnnnnnnnnnnnnnnnnnnnnnnnnnnnnnnnnnnnnnnnnnnnnnnnnnnnnnnnnnnnnnnnnnnnnnnnnnnnnnnnnnnnnnnnnnnnnnnnnnnnnnnnnnnnnnnnnnnnnnnnnnnnnnnnnnnnnnnnnnnnnnnnnnnnnnnnnnnnnnnnnnnnnnnnnnnnnnnnnnnnnnnnnnnnnnnnnnnnnnnnnnnnnnnnnnnnnnnnnnnnnnnnnnnnnnnnnnnnnnnnnnnnnnnnnnnnnnnnnnnnnnnnnnnnnnnnnnnnnnnnnnnnnnnnnnnnnnnnnnnnnnnnnnnnnnnnnnnnnnnnnnnnnnnnnnnnnnnnnnnnnnnnnnnnnnnnnnnnnnnnnnnnnnnnnnnnnnnnnnnnnnnnnnnnnnnnnnnnnnnnnnnnnnnnnnnnnnnnnnnnnnnnnnnnnnnnnnnnnnnnnnnnnnnnnnnnnnnnnnnnnnnnnnnnnnnnnnnnnnnnnnnnnnnnnnnnnnnnnnnnnnnnnnnnnnnnnnnnnnnnnnnnnnnnnnnnnnnnnnnnnnnnnnnnnnnnnnnnnnnnnnnnnnnnnnnnnnnnnnnnnnnnnnnnnnnnnnnnnnnnnnnnnnnnnnnnnnnnnnnnnnnnnnnnnnnnnnnnnnnnnnnnnnnnnnnnnnnnnnnnnnnnnnnnnnnnnnnnnnnnnnnnnnnnnnnnnnnnnnnnnnnnnnnnnnnnnnnnnnnnnnnnnnnnnnnnnnnnnnnnnnnnnnnnnnnnnnnnnnnnnnnnnnnnnnnnnnnnnnnnnnnnnnnnnnnnnnnnnnnnnnnnnnnnnnnnnnnnnnnnnnnnnnnnnnnnnnnnnnnnnnnnnnnnnnnnnnnnnnnnnnnnnnnnnnnnnnnnnnnnnnnnnnnnnnnnnnnnnnnnnnnnnnnnnnnnnnnnnnnnnnnnnnnnnnnnnnnnnnnnnnnnnnnnnnnnnnnnnnnnnnnnnnnnnnnnnnnnnnnnnnnnnnnnnnnnnnnnnnnnnnnnnnnnnnnnnnnnnnnnnnnnnnnnnnnnnnnnnnnnnnnnnnnnnnnnnnnnnnnnnnnnnnnnnnnnnnnnnnnnnnnnnnnnnnnnnnnnnnnnnnnnnnnnnnnnnnnnnnnnnnnnnnnnnnnnnnnnnnnnnnnnnnnnnnnnnnnnnnnnnnnnnnnnnnnnnnnnnnnnnnnnnnnnnnnnnnnnnnnnnnnnnnnnnnnnnnnnnnnnnnnnnnnnnnnnnnnnnnnnnnnnnnnnnnnnnnnnnnnnnnnnnnnnnnnnnnnnnnnnnnnnnnnnnnnnnnnnnnnnnnnnnnnnnnnnnnnnnnnnnnnnnnnnnnnnnnnnnnnnnnnnnnnnnnnnnnnnnnnnnnnnnnnnnnnnnnnnnnnnnnnnnnnnnnnnnnnnnnnnnnnnnnnnnnnnnnnnnnnnnnnnnnnnnnnnnnnnnnnnnnnnnnnnnnnnnnnnnnnnnnnnnnnnnnnnnnnnnnnnnnnnnnnnnnnnnnnnnnnnnnnnnnnnnnnnnnnnnnnnnnnnnnnnnnnnnnnnnnnnnnnnnnnnnnnnnnnnnnnnnnnnnnnnnnnnnnnnnnnnnnnnnnnnnnnnnnnnnnnnnnnnnnnnnnnnnnnnnnnnnnnnnnnnnnnnnnnnnnnnnnnnnnnnnnnnnnnnnnnnnnnnnnnnnnnnnnnnnnnnnnnnnnnnnnnnnnnnnnnnnnnnnnnnnnnnnnnnnnnnnnnnnnnnnnnnnnnnnnnnnnnnnnnnnnnnnnnnnnnnnnnnnnnnnnnnnnnnnnnnnnnnnnnnnnnnnnnnnnnnnnnnnnnnnnnnnnnnnnnnnnnnnnnnnnnnnnnnnnnnnnnnnnnnnnnnnnnnnnnnnnnnnnnnnnnnnnnnnnnnnnnnnnnnnnnnnnnnnnnnnnnnnnnnnnnnnnnnnnnnnnnnnnnnnnnnnnnnnnnnnnnnnnnnnnnnnnnnnnnnnnnnnnnnnnnnnnnnnnnnnnnnnnnnnnnnnnnnnnnnnnnnnnnnnnnnnnnnnnnnnnnnnnnnnnnnnnnnnnnnnnnnnnnnnnnnnnnnnnnnnnnnnnnnnnnnnnnnnnnnnnnnnnnnnnnnnnnnnnnnnnnnnnnnnnnnnnnnnnnnnnnnnnnnnnnnnnnnnnnnnnnnnnnnnnnnnnnnnnnnnnnnnnnnnnnnnnnnnnnnnnnnnnnnnnnnnnnnnnnnnnnnnnnnnnnnnnnnnnnnnnnnnnnnnnnnnnnnnnnnnnnnnnnnnnnnnnnnnnnnnnnnnnnnnnnnnnnnnnnnnnnnnnnnnnnnnnnnnnnnnnnnnnnnnnnnnnnnnnnnnnnnnnnnnnnnnnnnnnnnnnnnnnnnnnnnnnnnnnnnnnnnnnnnnnnnnnnnnnnnnnnnnnnnnnnnnnnnnnnnnnnnnnnnnnnnnnnnnnnnnnnnnnnnnnnnnnnnnnnnnnnnnnnnnnnnnnnnnnnnnnnnnnnnnnnnnnnnnnnnnnnnnnnnnnnnnnnnnnnnnnnnnnnnnnnnnnnnnnnnnnnnnnnnnnnnnnnnnnnnnnnnnnnnnnnnnnnnnnnnnnnnnnnnnnnnnnnnnnnnnnnnnnnnnnnnnnnnnnnnnnnnnnnnnnnnnnnnnnnnnnnnnnnnnnnnnnnnnnnnnnnnnnnnnnnnnnnnnnnnnnnnnnnnnnnnnnnnnnnnnnnnnnnnnnnnnnnnnnnnnnnnnnnnnnnnnnnnnnnnnnnnnnnnnnnnnnnnnnnnnnnnnnnnnnnnnnnnnnnnnnnnnnnnnnnnnnnnnnnnnnnnnnnnnnnnnnnnnnnnnnnnnnnnnnnnnnnnnnnnnnnnnnnnnnnnnnnnnnnnnnnnnnnnnnnnnnnnnnnnnnnnnnnnnnnnnnnnnnnnnnnnnnnnnnnnnnnnnnnnnnnnnnnnnnnnnnnnnnnnnnnnnnnnnnnnnnnnnnnnnnnnnnnnnnnnnnnnnnnnnnnnnnnnnnnnnnnnnnnnnnnnnnnnnnnnnnnnnnnnnnnnnnnnnnnnnnnnnnnnnnnnnnnnnnnnnnnnnnnnnnnnnnnnnnnnnnnnnnnnnnnnnnnnnnnnnnnnnnnnnnnnnnnnnnnnnnnnnnnnnnnnnnnnnnnnnnnnnnnnnnnnnnnnnnnnnnnnnnnnnnnnnnnnnnnnnnnnnnnnnnnnnnnnnnnnnnnnnnnnnnnnnnnnnnnnnnnnnnnnnnnnnnnnnnnnnnnnnnnnnnnnnnnnnnnnnnnnnnnnnnnnnnnnnnnnnnnnnnnnnnnnnnnnnnnnnnnnnnnnnnnnnnnnnnnnnnnnnnnnnnnnnnnnnnnnnnnnnnnnnnnnnnnnnnnnnnnnnnnnnnnnnnnnnnnnnnnnnnnnnnnnnnnnnnnnnnnnnnnnnnnnnnnnnnnnnnnnnnnnnnnnnnnnnnnnnnnnnnnnnnnnnnnnnnnnnnnnnnnnnnnnnnnnnnnnnnnnnnnnnnnnnnnnnnnnnnnnnnnnnnnnnnnnnnnnnnnnnnnnnnnnnnnnnnnnnnnnnnnnnnnnnnnnnnnnnnnnnnnnnnnnnnnnnnnnnnnnnnnnnnnnnnnnnnnnnnnnnnnnnnnnnnnnnnnnnnnnnnnnnnnnnnnnnnnnnnnnnnnnnnnnnnnnnnnnnnnnnnnnnnnnnnnnnnnnnnnnnnnnnnnnnnnnnnnnnnnnnnnnnnnnnnnnnnnnnnnnnnnnnnnnnnnnnnnnnnnnnnnnnnnnnnnnnnnnnnnnnnnnnnnnnnnnnnnnnnnnnnnnnnnnnnnnnnnnnnnnnnnnnnnnnnnnnnnnnnnnnnnnnnnnnnnnnnnnnnnnnnnnnnnnnnnnnnnnnnnnnnnnnnnnnnnnnnnnnnnnnnnnnnnnnnnnnnnnnnnnnnnnnnnnnnnnnnnnnnnnnnnnnnnnnnnnnnnnnnnnnnnnnnnnnnnnnnnnnnnnnnnnnnnnnnnnnnnnnnnnnnnnnnnnnnnnnnnnnnnnnnnnnnnnnnnnnnnnnnnnnnnnnnnnnnnnnnnnnnnnnnnnnnnnnnnnnnnnnnnnnnnnnnnnnnnnnnnnnnnnnnnnnnnnnnnnnnnnnnnnnnnnnnnnnnnnnnnnnnnnnnnnnnnnnnnnnnnnnnnnnnnnnnnnnnnnnnnnnnnnnnnnnnnnnnnnnnnnnnnnnnnnnnnnnnnnnnnnnnnnnnnnnnnnnnnnnnnnnnnnnnnnnnnnnnnnnnnnnnnnnnnnnnnnnnnnnnnnnnnnnnnnnnnnnnnnnnnnnnnnnnnnnnnnnnnnnnnnnnnnnnnnnnnnnnnnnnnnnnnnnnnnnnnnnnnnnnnnnnnnnnnnnnnnnnnnnnnnnnnnnnnnnnnnnnnnnnnnnnnnnnnnnnnnnnnnnnnnnnnnnnnnnnnnnnnnnnnnnnnnnnnnnnnnnnnnnnnnnnnnnnnnnnnnnnnnnnnnnnnnnnnnnnnnnnnnnnnnnnnnnnnnnnnnnnnnnnnnnnnnnnnnnnnnnnnnnnnnnnnnnnnnnnnnnnnnnnnnnnnnnnnnnnnnnnnnnnnnnnnnnnnnnnnnnnnnnnnnnnnnnnnnnnnnnnnnnnnnnnnnnnnnnnnnnnnnnnnnnnnnnnnnnnnnnnnnnnnnnnnnnnnnnnnnnnnnnnnnnnnnnnnnnnnnnnnnnnnnnnnnnnnnnnnnnnnnnnnnnnnnnnnnnnnnnnnnnnnnnnnnnnnnnnnnnnnnnnnnnnnnnnnnnnnnnnnnnnnnnnnnnnnnnnnnnnnnnnnnnnnnnnnnnnnnnnnnnnnnnnnnnnnnnnnnnnnnnnnnnnnnnnnnnnnnnnnnnnnnnnnnnnnnnnnnnnnnnnnnnnnnnnnnnnnnnnnnnnnnnnnnnnnnnnnnnnnnnnnnnnnnnnnnnnnnnnnnnnnnnnnnnnnnnnnnnnnnnnnnnnnnnnnnnnnnnnnnnnnnnnnnnnnnnnnnnnnnnnnnnnnnnnnnnnnnnnnnnnnnnnnnnnnnnnnnnnnnnnnnnnnnnnnnnnnnnnnnnnnnnnnnnnnnnnnnnnnnnnnnnnnnnnnnnnnnnnnnnnnnnnnnnnnnnnnnnnnnnnnnnnnnnnnnnnnnnnnnnnnnnnnnnnnnnnnnnnnnnnnnnnnnnnnnnnnnnnnnnnnnnnnnnnnnnnnnnnnnnnnnnnnnnnnnnnnnnnnnnnnnnnnnnnnnnnnnnnnnnnnnnnnnnnnnnnnnnnnnnnnnnnnnnnnnnnnnnnnnnnnnnnnnnnnnnnnnnnnnnnnnnnnnnnnnnnnnnnnnnnnnnnnnnnnnnnnnnnnnnnnnnnnnnnnnnnnnnnnnnnnnnnnnnnnnnnnnnnnnnnnnnnnnnnnnnnnnnnnnnnnnnnnnnnnnnnnnnnnnnnnnnnnnnnnnnnnnnnnnnnnnnnnnnnnnnnnnnnnnnnnnnnnnnnnnnnnnnnnnnnnnnnnnnnnnnnnnnnnnnnnnnnnnnnnnnnnnnnnnnnnnnnnnnnnnnnnnnnnnnnnnnnnnnnnnnnnnnnnnnnnnnnnnnnnnnnnnnnnnnnnnnnnnnnnnnnnnnnnnnnnnnnnnnnnnnnnnnnnnnnnnnnnnnnnnnnnnnnnnnnnnnnnnnnnnnnnnnnnnnnnnnnnnnnnnnnnnnnnnnnnnnnnnnnnnnnnnnnnnnnnnnnnnnnnnnnnnnnnnnnnnnnnnnnnnnnnnnnnnnnnnnnnnnnnnnnnnnnnnnnnnnnnnnnnnnnnnnnnnnnnnnnnnnnnnnnnnnnnnnnnnnnnnnnnnnnnnnnnnnnnnnnnnnnnnnnnnnnnnnnnnnnnnnnnnnnnnnnnnnnnnnnnnnnnnnnnnnnnnnnnnnnnnnnnnnnnnnnnnnnnnnnnnnnnnnnnnnnnnnnnnnnnnnnnnnnnnnnnnnnnnnnnnnnnnnnnnnnnnnnnnnnnnnnnnnnnnnnnnnnnnnnnnnnnnnnnnnnnnnnnnnnnnnnnnnnnnnnnnnnnnnnnnnnnnnnnnnnnnnnnnnnnnnnnnnnnnnnnnnnnnnnnnnnnnnnnnnnnnnnnnnnnnnnnnnnnnnnnnnnnnnnnnnnnnnnnnnnnnnnnnnnnnnnnnnnnnnnnnnnnnnnnnnnnnnnnnnnnnnnnnnnnnnnnnnnnnnnnnnnnnnnnnnnnnnnnnnnnnnnnnnnnnnnnnnnnnnnnnnnnnnnnnnnnnnnnnnnnnnnnnnnnnnnnnnnnnnnnnnnnnnnnnnnnnnnnnnnnnnnnnnnnnnnnnnnnnnnnnnnnnnnnnnnnnnnnnnnnnnnnnnnnnnnnnnnnnnnnnnnnnnnnnnnnnnnnnnnnnnnnnnnnnnnnnnnnnnnnnnnnnnnnnnnnnnnnnnnnnnnnnnnnnnnnnnnnnnnnnnnnnnnnnnnnnnnnnnnnnnnnnnnnnnnnnnnnnnnnnnnnnnnnnnnnnnnnnnnnnnnnnnnnnnnnnnnnnnnnnnnnnnnnnnnnnnnnnnnnnnnnnnnnnnnnnnnnnnnnnnnnnnnnnnnnnnnnnnnnnnnnnnnnnnnnnnnnnnnnnnnnnnnnnnnnnnnnnnnnnnnnnnnnnnnnnnnnnnnnnnnnnnnnnnnnnnnnnnnnnnnnnnnnnnnnnnnnnnnnnnnnnnnnnnnnnnnnnnnnnnnnnnnnnnnnnnnnnnnnnnnnnnnnnnnnnnnnnnnnnnnnnnnnnnnnnnnnnnnnnnnnnnnnnnnnnnnnnnnnnnnnnnnnnnnnnnnnnnnnnnnnnnnnnnnnnnnnnnnnnnnnnnnnnnnnnnnnnnnnnnnnnnnnnnnnnnnnnnnnnnnnnnnnnnnnnnnnnnnnnnnnnnnnnnnnnnnnnnnnnnnnnnnnnnnnnnnnnnnnnnnnnnnnnnnnnnnnnnnnnnnnnnnnnnnnnnnnnnnnnnnnnnnnnnnnnnnnnnnnnnnnnnnnnnnnnnnnnnnnnnnnnnnnnnnnnnnnnnnnnnnnnnnnnnnnnnnnnnnnnnnnnnnnnnnnnnnnnnnnnnnnnnnnnnnnnnnnnnnnnnnnnnnnnnnnnnnnnnnnnnnnnnnnnnnnnnnnnnnnnnnnnnnnnnnnnnnnnnnnnnnnnnnnnnnnnnnnnnnnnnnnnnnnnnnnnnnnnnnnnnnnnnnnnnnnnnnnnnnnnnnnnnnnnnnnnnnnnnnnnnnnnnnnnnnnnnnnnnnnnnnnnnnnnnnnnnnnnnnnnnnnnnnnnnnnnnnnnnnnnnnnnnnnnnnnnnnnnnnnnnnnnnnnnnnnnnnnnnnnnnnnnnnnnnnnnnnnnnnnnnnnnnnnnnnnnnnnnnnnnnnnnnnnnnnnnnnnnnnnnnnnnnnnnnnnnnnnnnnnnnnnnnnnnnnnnnnnnnnnnnnnnnnnnnnnnnnnnnnnnnnnnnnnnnnnnnnnnnnnnnnnnnnnnnnnnnnnnnnnnnnnnnnnnnnnnnnnnnnnnnnnnnnnnnnnnnnnnnnnnnnnnnnnnnnnnnnnnnnnnnnnnnnnnnnnnnnnnnnnnnnnnnnnnnnnnnnnnnnnnnnnnnnnnnnnnnnnnnnnnnnnnnnnnnnnnnnnnnnnnnnnnnnnnnnnnnnnnnnnnnnnnnnnnnnnnnnnnnnnnnnnnnnnnnnnnnnnnnnnnnnnnnnnnnnnnnnnnnnnnnnacgccgcagtccaagcgcgatcgcccgtaatctgtcttgacatatgtgttgccttacgcgtcgacgttatccaatcgcttgagatctctcgatagaccctcttgatccgcgaccgtagccggatccctgcctatcgttctgtcaccatgtcgcttgatgtcatcgcagttggaaattctcgttcggtgcttcaccacaaagtaaatagcatcgtggctcataacattaagtttgatgataatgtgattttatctgaattatatcgcagtggcaatgatgatgtagtttgtctgtggaagtaagacttctttcgactggtgcgaaactccaacgtagcatatgtcatatgaggcattagagagaccgtttgcaaccggagcgtagcggaggtctgcaatggtcggcgcgtaggccggagtagttgcactgcaaagtagttactatctctttaccgacgccttgcccgccatgagcgaagcgaagcgtagcagaattggcggtgcaaacgaggagctcacctgttctcggttaaatacgaaatgaggtcaacggatgaaggagagacggctgtcatcacctgttccttctgtcactacaaatggtttaattaagtttgtttcggacaaggcaatcacattcaaagaactattttttaatcactagatatccaatcgaatcattttttgtgtctcgtttaaccagacgagggcgccttttgggtggcttggaattgcgacgcgcagctcgatccagccaagtcattgcggcagagttgtttctcttggtcgcgcacgtagccataagtttgtgaaaatacttgtcgtccacgaatgagtatgtccagcgcagaaagtcaatcgaactcgattgacacgaccgcacagccagtatggtctttataggtttcatgtaggtgttattgagggttgctggtcttgggtactgtgtaccagttgtacccattaaccggttaacccgaaccggtccaatccgaacccacgttgattatggtgattacggtaagttgtacgccaccgatgattagacgagtaggatgattggatgaacaccggtgagtgatggttgattagatgcactaggtgataggacgcagggtcgcgtgtctataacagtagggtgtaagctccaacaattcaatcactttcgaatcttcattctatccctcaagtgccttcagtccggtcccgccgtctgcgacgtccttccctccgcttcgtccgagcttcgtgtccaagatccataccttccatcacactgggcttccggaaagcttcaatttgttagccactccgctgacattaaacaattgggattattgcagaatggtttaactagcttggcggatctatagcgtagataataaactattatcaagtaagtgttttctaataaaacccgagggatttaccattccactgtcatctgcaatgattcataagattactacagaagaagcattggaaaagagtcacccgcttggcgatgtattagactttcttttcattgatatcaatgtccatgaagttgtggtgtagcgggatcggccaaaatctggttaaggcctgatcgagcttcccaccagcgcccagacaccgactaacggagggggtcccccaacgatccgtgatcggctgaacttgttctcaccttgtgtacccgtcggcgggctggatctgctctctcggggctccgaagatgcagcacttggtgaagatcgagtgtcttggtgtgacgcggggatagtttgtggagcagcgcggtagtcttcgctctgcatccgagtatacgctccgatcgagggttcttcgcttcgatcggtcggcctggagtagatccaaggcctgtagttgcctttccgggtgtgttccttcctttcctgagttgcttgccgcttcctatagcgggatcgaggtcgattgagagacgcagcgatcgccggccaagcagtatccggtcgatcgaggacttgcacacgagagaaagatcactagagtaggtccagctgaccaatgtattaatccagtcttaaccgtaccgctagttcactactcgaagtgtcaacgcttgccgaggccaatgtagctcctgggacttgacgacttgagggcacttgtggtcttctgtgcaaattgcgttctgatttatgtttagctggtctctctctaccgctgccatctcatctaccatcctacaaccaaacgattactggattcttgccctggcttcgcccccatgtgcttcccatccgggtcgatcggcgatccacgatcggctcccgatccacgatcgaccccaatcggcgatccacgatcgcctcctgatccacgatcgatcccgatcggcgatcaactcccgatcgatgacctgtgcgagttgccgtgcgctgccgatccgtcctcttctgtcctcggccgccctagatctgcgagattggtcgtcgatccgggcttgggtctacgtcgaatcacgccgcagtccaagcgcgatcgcccgtaatctgtcttgacatatgtgttgccttacgcgtcgacgttatccaatcgcttgagatctctcgatagaccctcttgatccgcgaccgcagcctgatccctgcctatcgttctgtcaccatgtcgcttgatgtcatcgcagttggaaattctcgttcggtgcttcaccacaaagtaaatagcatcgtggctcataacattaagtttgatgataatgtgattttatctgaattatatcgcagtggcaatgatgatgtagtttgtctgtggaagtaagacttctttcgactggtgcgaaactccaacgtagcatatgtcatatgaggcattagagagaccgtttgcaaccggagcgtagcggaggtctgcaatggtcggcgcgtaggccggagtagttgcactgcgaagtagttactatctttttaccgacgccttgcccgccatgagcgaagcgaagcgtagcagaattggcggtgcaaacgaggagctcacctgttctcggttaaatacgaaatgaggtcaacggatgaaggagagacggctgtcatcacctgttccttctgtcactacaaatggtttaattaagtttgtttcggacaaggcaatcacattcaaagaactattttttaatcactagatatccaatcgaatcattttttgtggctgagatgtgtctcgtttaaccagacgagggcgccttttgggtggcttggaattgcgacgcgcagctcgatccagccaagtcattgcggcagagttgtttctcttggtcgcgcacgtagccataagtttgtgaaaatacttgtcgtccacgaatgagtatgtccagcgcagaaagtcaatcgaactcgattgacacgaccgcacagccagtatggtctttataggtttcatgtaggtgttattgagggttgctggtattgggtactgtgtaccagttgtacccattaaccggttaacccgaaccggtccaatccgaacccacgttgattatggtgattacggtaagttgtacgccaccgatgattagacgagtaggatgattggatgaacaccggtgagtgatggttgattagatgcactaggtgataggacgcagggtcgcgtgtctataacagtagggtgtaagctccaacaattcaatcactttcgaatcttcattctatccctcaagtgccttcagtccggtcccgccgtctgcgacgtccttccctccgcttcgtccgagcttcgtgtccaagatccataccttccatcacactgggcttccggaaagcttcaatttgttagccactccgctgacattaaacaattgggattattgcagaatggtttaactagcttggcggatctatagcgtagataataaactattatcaagtaagtgttttctaataaaacccgagggatttaccattccactgtcatctgcaatgattcataagattactacagaagaagcattggaaaagagtcacccgcttggcgatgtattagactttcttttcattgatatcaatgtccatgaagttgtggtgtagcgggatcggccaaaatctggttaaggcctgatcgagcttcccaccagcgcccagacaccgactaacggagggggtcccccaacgatccgtgatcggctgaacttgttctcaccttgtgtacccgtcggcgggctggatctgctctctcggggctccgaagatgcagcacttggtgaagatcgagtgtcttggtgtgacgcggggatagtttgtggagcagcgcggtagtcttcgctctgcgtccgagtatacgctccgatcgagggttcttcgcttcgatcggtcggcctggagtagatccaaggcctgtagttgcctttccgggtgtgttccttcctttcctgagttgcttgccgcttcctatagcgggatcgaggtcgattgagagacgcagcgatcgccggccaagcagtatccggtcgatcgaggacttgcacacgagagaaagatcactagagtaggtccagctgaccaatgtattaatccagtcttaaccgtaccgctagttcactactcgaagtgtcaacgcttgccgaggccaatgtagctcctgggacttgacgacttgagggcacttgtggtcttctgtgcaaattgcgttctgatttatgtttagctggtctctctctaccgctgccatctcatctaccatcctacaaccaaacgattactggattcttgccctggcttcgcccccatgtgcttcccatccgggtcgatcggcgatccacgatcggctcccgatccacgatcgaccccaatcggcgatccacgatcggctcccgatccacgatcgcctcctgatccacgatcgatcccgatcggcgatcaactcccgatcgatgacctgtgcgagttgccgtgcgctgccgatccgtcctcttctgtcctcggccgccctagatctgcgagattggtcgtcgatccgggcttgggtctacgtcgaatcacgccgcagtccaagcgcgatcgcccgtaatctgtcttgacacatgtgttgccttacgcgtcgacgttatccaatcgcttgagatctctcgatagaccctcttgatccgcgaccgcagcctgatccctgcctatcgttctgtcaccatgtcgcttgatgtcatcgcagttggaaattctcgttcggtgcttcgccacaaagtaaatagcatcgtggctcataacattaagtttgatgataatgtgattttatctgaattatatcgcagtggcaatgatgatgtagtttgtctgtggaagtaagacttctttcgactggtgcgaaactccaacgtagcatatgtcatatgaggcattagagagaccgtttgcaaccggagcgtagcggaggtctgcaatggtcggcgcgtaggccggagtagttgcactgcgaagtagttactatctttttaccgacgccttgcccgccatgagcgaagcgaagcgtagcagaattggcggtgcaaacgaggagctcacctgttctcggttaaatacgaaatgaggtcaacggatgaaggagagacggctgtcatcacctgttccttctgtcactacaaatggtttaattaagtttgtttcggacaaggcaatcacattcaaagaactattttttaattactagatatccaatcgaatcattttttgtggctgagatgtgtctcgtttaaccagacgagggcgccttttgggtggcttggaattgcgacgcgcagctcgatccagccaagtcattgcggcagagttgtttctcttggtcgcgcacgtagccataagtttgtgaaaatacttgtcgtccacgaatgagtatgtccagcgcagaaagtcaatcgaactcgattgacacgaccgcacagccagtatggtctttataggtttcatgtaggtgttattgagggttgctggtcttgggtactgtgtaccagttgtacccattaaccggttaacccgaaccggtccaatccgaacccacgttgattatggtgattacggtaagttgtttacgccaccgatgattagacgagtaggatgattggatgaacaccggtgagtgatggttgattagatgcactaggtgataggacgcagggtcgcgtgtctataacagtagggtgtaagctccaacaattcaatcactttcgaatcttcattctacccctcaagtgccttcgctccggtcccgccgtctgcgacgtccctccctccgcttcgtccgagcttcgtgtccaagatccataccttccatcaggaaatgcaacgatgtgtttgttataattaagagtcttcgtattgtgtcgcgttcgatgcagattgatataatgagtggcatttacaaaaggaagagcacttgagcagtagttggcaaaatgcaaaaagtgattcgattcaggtccttagttcgcaaccgcgtgctacctctaagcctgctactggatacctcttactggatacaccctactggattctctactggatacacagttaccttatccaatcagagaacgccacgtcgatgcccatcttgtacccacaatcttggcgtaatcaccgtgacgtaatcatcgtcccgtaatcacctgaatgatttcggtaccacacagtgaaggtcacgccgacctcactgatgacgcgttcacgtcacacggtcgcttggcggggcgtcgtcacatcagtcttgacaacactcccactcgactcgtcagcgaccacgatgcccagcttcgtcctgagcgcgtcgaactgcggcgccgcgatcggcttcgtcatgatgtccgccagcatgtcgagtgtcgaaacatactgcaacaccacttgaccgtcttccaccttctcgcgcacgaagtggtagcgaatgtcgatgtgcttggtgcgcttgtggaactccgggttcttggccaacgcgatggagccttggttgtcctcgtagatcttcaccgcttcatcgctcgccatctcgcccagctcgcacagaaacaccttgagccacaccgcctcctgcgtggcctccgacagcgccatgtactcggcttccgtcgacgagagcgccaccgtgcgctgcttcttgcttcgccagctgatgcatccgccgttcatcatgaacgcgtagccgctcgtactccgtcgagactcgatgtcgccggcccagtccgcgtccgagtagccttgcagtccgtcctcgctgctcgcttgaaacacgaggccgtgcgtcttcgtgcctcggatgtagcggaagaccctcttgagcgcctgccagtgtgtcggacatgggtccgctgcgaactggctcagcactcccactgccgctgcgaggtccggacgagtccccaccatgagatacatgaggcagcccacggcgttccggtacggaacattcgccatggtctcgtcgtgcttgcagcctccctcgcacatggccttggtcagcttcagacccggatcctgcggtgtcttcacagggttgctctcatccatcttgaacttctcgagaatgtccttcgcgaacttggtctgccgcaccgacaccttcccagtcgccacatcttgctcgatctccataccgagaaagtacttgagctggcccatgtcggtcatctcgaaccggtcactcagcgcctgcttcgtgtccttcagcatcccgtcgctgctgctggcgaggaccagatcgtccacgtacagtgccacgaacatcatgtcgtgattgtcccgcttcaagtagatgcagtggtcggactcgcacttcttgaaccccagtttcaacatgaactcgtcgatcgtcttgttccacatccgcggcgactgcttcaggccgtacagcgaacgcttgagccggcacacgtagtcgggtcgatctccgtccacatatccgtccggctgcgccatgtagatgtcctcgtccaacaagccgttgaggaacgcggtcttcacatccatctggtgcactgtgagcttgtacttggccgccagactcaacaacacccgaatcgacgtgaacttggccaccggcgcgaacgtctcgtcgtagtcgatgccgtatttctgcgagaaccccttcgccaccagtcgcgccttgaaccgctcgatctctccagactggttctccttcacgcggaacacccatctgcagccgatcgccttgcgtcccttcggcagtggcaccagggtccacgtctcgttcttgcggagcgactccacctccgagtcgcacgcctctttccacttgtctgcgtcgctggattccatcgccgacttgaacgttgtcggcatctctcccactgaatccacgacgtacgcagcctcgaagtcttccttctcttgtgctgcggcagacatctcgtccagcggctgctgtcgtctcggcaccgcataccgcttggcactcggaacctccacggcttcctcgagcgactgcgtgcgcgggtgtcgcttgctgccgggttcaaagtcttgattccgcgcagcttcttctctgttctcgtctgatccggactgagtctcttcatccgtggtgtcttcatcatcatctgtcggaagacccaccaacacctccttcgaagcgtagtcgcgtctcccaccgtcgaagacatcctccatgaactgcgcgtcgcggctcgccaacacgcgaccgctctcgatctcctcaaaccgatacgccttctcgtgctccgagtacccgaggaaacgacagcgcaccgaccgagcgtcgaacttcgaccgcttctccttcggcacgtgcacgtacgcgtggcacccgaacaccttgaggttggccagcaaaggcttcttgccggtccaaacgtggtgcggcgacttgtcgtgactgatggcgcgcgtcggacaccggttgcggaggaacgtggccgtcatcaccgcttctccccagtactccttcgacaacccggcgtgctccagcatgcagcgcgcacactccaccagcgtccgattcattcgctcggccactccgttgagctgaggcgtgtatggtggcgtgaacttctgctcgataccgcgatccgcacacaacttggccatcgcacccgaagtgtactcgccgccgttgtcgctccgaagcaccttcactcgcttgccggtctgcgtctcagccaacgcgacgaacgcagcgaacttggcagccacctccgacttgttccgtagcaggtacaccacgcagaagtgcgacttgtcgtcgatgaacgtgacgaagtagcgcttgcctccgaacgtcgccgtctgcatcggaccgcacacatcgctgtggaccacctccagcacttgcttcgcacggttcggcgacgacttcatgaagcttactcgcgtttgcttgccgagtgcgcacccgtcgcacacctcccactgcttcaccgacgtcattgggatgccagtgccgtagcccttcttgacgatggcgtcgagaccaccatggccgatgtgaccaagtcgaaggtgccagaggtacgacgtggtgtccccttggcgattcttcgagcttgccgcattggcctcgtcagcaggcgtcctcggcgtcatgcagagcttgaacagtcctttgccttcgcgagcgccgagcttccacttgagacccttcgtttccgcaaagcacccgtcgctctcgaaggtcactggcccgacgtccttggtgaagcggccgacggagaacaggttgcgcgacagcttcgggatgtgccacacacccgtgagcacacccttcttcatgccgcgcggtgtctgcatcgacatcacgatgtcgccgctccccaccgcctgaaccacgccgtcgtccgccagatgcacgtccaccggagagatcttcttgtaattcttcatgtactccttcgagtacgtcatgtgctgcgtcgcacccgagtcgaccagccacatgccgctcagcttggaggcacccgtgtcgccaccaaccgagaagaggaagtcgccagagtcatcttcgacctgcgcgacgttcgctcgttgcggcctctgccgctccccgttctcgcggatccgcaccggacacttggcgatccaatgtccgtgctcgccgcagtagtgacaggcgctcgtcctctgcgcttgcgcctgccgtcccttgcgcttcccgttgtcgcttgtcatgaacgcttgaccttgagcgtgcgcggttccgtcagcaccgccaccttgttccttgcgcttcatgtcctcgtgcaggagccgagacgtcaccacctcccacgtcagcgtgtcggaacgcgattccaacgccgtgatgaggaactggtacgactcgctcagactggcaagaagcgtgattaccaagtcgtcctcgctgaccggagcgccgaccgcgtcgagctgttccgccagcgtcttgagcttgttaatgtgctccagcacatcatcaccttcgtccatcgttgtcgtggagaaccgtcgacgaagaaagagcttgttcgccaggctcttcttctcgaagtgtccctcgagtcttgaccatgcatcatgcgcgtccttcgccgaccgcaccagcggcagctgcgagtcctccaacgcgagacagacgatcgtcagcgccttgcgcgacttcttgcgaaacgtcgcttggtccgccgcggtcgtgcactgctcgagcttcacttccccactcgtcacttcccacagttcgcgctcctccagcaccatctgcatcttgaacttccatgtgtggaagttggttccgtcgaacttgttgatgcgggcggtcgcggtcggggcggcgtccatggcgaaggcgtagtcggggtcttggtcagggaagacggggcttgggctcataaccaaaaggaagaacacttgagcagtagttggcaaaatgcaaagtgattcgattcaggtccttagttcgcaaccgcgtgctacctctaagcctgctactggatacctcttactgggtacaccctactggattctctactggatacacagttaccttatccaatcagagaacgccacgtcgatgcccatcttgtacccacaatcatgtacccacaatcatggcgtaatcaccgtgacgtaatcatcgtcccgtaatcacctgaatgattgcggtacaacacagtgaaggtcacgccgacctcactgatgacgcgttcgcgtcacacggtcgcttggcgaggcgtcgtcacatcagtcttgacaacactcccactcgactcgtcatctgcaatgattcataagattactacagaagaagcattggaaaagagtcacccgcttggcgatgtattagactttcttttcattgatatcaatgtccatgaagttgtggtgtagcgggatcggccaaaatctggttaaggcctgatcgagcttcccaccagcgcccagacaccgactaacggagggggtcccccaacgatccgtgatcggctgaacttgttctcaccttgtgtacccgtcggcgggctggatctgctctctcggggctccgaagatgcagcacttggtgaagatcgagtgtcttggtgtgacgcggggatagtttgtggagcagcgcggtagtcttcgctctgcgtccgagtatacgctccgatcgagggttcttcgcttcaatcggtcggcctggagtagatccaaggcctgtagttgcctttccgggtgtgttccttcctttcctgagttgcttgccgcttcctatagcgggatcgaggtcgattgagagacgcagcgatcgccggccaagcagtatccggtcgatcgaggacttgcacacgagagaaagatcactagagtaggtccagctgaccaatgtattaatccagtcttaaccgtaccgctagttcactactcgaagtgtcaacgcttgccgaggccaatgtagctcctgggacttgacgacttgagggcacttgtggtcttctgtgcaaattgcgttctgatttatgtttagctggtctctctctaccgctgccatctcatctaccatcctacaaccaaacgattactggattcttgccctggcttcgcccccatgtgcttcccatccgggtcgatcggcgatccacgatcggctcccgatccacgatcgaccccaatcggcgatccacgatcgcctcctgatccacgatcgatcccgatcggcgatcaactcccgatcgatgacctgtgcgagttgccgtgcgctgccgatccgtcctcttctgtcctcggccgccctagatctgcgagattggtcgtcgatccgggcttgggtctacgtcgaatcacgccgcagtccaagcgcgatcgcccgtaatctgtcttgacatatgtgttgccttacgcgtcgacgttatccaatcgcttgagatctctcgatagaccctcttgatccgcgaccgtagccggatccctgcctatcgttctgtcaccatgtcgcttgatgtcatcgcagttggaaattctcgttcggtgcttcgccacaaagtaaatagcatcgtggctcataacattaagtttgatgataatgtgattttatctgaattatatcgcagtggcaatgatgatgtagtttgtctgtggaagtaagacttctttcgactggtgcgaaactccaacgtagcatatgtcatatgaggcattagagagaccgtttgcaaccggagcgtagcggaggtctgcaatggtcggcgcgtaggccggagtagttgcactgcgaagtagttactatctctttaccgacgccttgcccgccatgagcgaagcgaagcgtagcagaattggcggtgcaaactattgagggttgttggtcttgggtactgtgtaccagttgtacccattaaccggttaacccgaaccggtccaatccgaacccacgttgattatggtgattacggtaagttgtttacgccaccgatgattagacgagtaggatgattggatgaacaccggtgagtgatggttgattagatgcactaggtgataggacgcagggtcgcgtgtctataacagtagggtgtaagctccaacaattcaatcactttcgaatcttcattctatccctcaagtgccttcggtccggtcccgccgtctgcgacgtccctccctccgcttcgtccgagcttcgtgtccaagatccataccttccatcaggttatgagcccaagcaccatgtcctctgccgaagacgcctcgaccaaggtctccattgacaagttcaacggggacaactacgcgacgtggaaccgctacatgcgtggcgtgttcctgaccaagtcgacgtggcatgtcgtgaaccgcgagacgacgccgagcttcacggactcgcgggccaaggacgactacgtcaagtcgagcaacatcgcgttcggactgatgttgctccacatggacgcggactaccaccatgtggtcgacgactgcgaggaagcgtgggttgcgtggacgcgcctgaagacgctgtacggtggttcgcagaaggctggacgcatctacctgaagcgccaactcttcagcatggagatgtcggaaggcggcaacgtcttgcatcattgcaacgaggtcctcaacatcagcgccaagctcagcagcatcggcgccaagatggaggatgaggacgtggcgatctgcctgttgcgcagcctccccaagagctacgagaacgtcgtgctgaacttggagatgagcagcgctgaactacgatcgcaagacgtcgtgaaggtgctgacgaatgagcacatcaagagacaaggcgagaagacggcgacggtgaagacggagaatgcggccaaggcgttcaacaccgaccgagagtctcgccagtgtacgtactgcgggaaattggggcacacgattgacaagtgctggaccaagcagaaggacgagaatcggggcccaagacgcggcggcaatggcaatggccgtggacgcggggccaacaatgcccagtggaggaacgacgacgccagctacaactacgactacggctatgatcgagtggcgttcgcggtctcactggagtgtggcatttcgacgggcaagaatgtgtccgggttgtgggcggtcgacagcggcgcaacgcaccacatctgcaacgacaaggccaagttcgctcatttgattgagcggaatgaaggcgaactttcggtggccgacggcaacaaggcggccaccacgggtgtggggaccatcgtggaacgagtggttctgcccaacggcgacgagcgcgacatcgagatcaagaacgcgctgtacgtcccaagcatgagcaagaatctgctttcggtgccacagatcaacaagagtggcctgttccaagtcgtgttcgacagcaccaagatgcagattgcgcacaagggctccaagcaagtggtggcgacggcaaacctcgtggatggactctactggctccagacgcctcagcgatcggcgaatgcggcgaccagtgggaagacggtcgacttacacgcgcgtatgggtcacgctccggtggaggtgcttcgcaagatggtcgacaacaacatgatcaaggacgcgaaggcaccttccaagtcgagtggaccaagcgtgtgtcgcggctgccaacaagggaaaatggtccagaagccgttcccaagcaactgtgacaagcgtcactacgacacattcgagctgctccacttcgacgtgtgcggccccatggaagaagagtcactgggtggcagcaagtatctgctgctgatcgtggacgaagccagcggatgcatgaaggggttctgcctgcgtgccaagtcggagagcgaggactgcatcaagatgtacgtcacgaaggtgcagacgcagttcggcaagaaggtcaagtttgtgcggcacgacggagcccgtgagttcgcgaccaactcgctcaaggccttctacgaagccgaagacatcgagcagcaaaccacggttccgtacgcgcaccagaccaacggcacggcagaacgcgccatccggaccatcgtcacgattggccgcagcatgctgcatcacnnnnnnnnnnnnnnnnnnnnnnnnnnnnnnnnnnnnnnnnnnnnnnnnnnnnnnnnnnnnnnnnnnnnnnnnnnnnnnnnnnnnnnnnnnnnnnnnnnnnnnnnnnnnnnnnnnnnnnnnnnnnnnnnnnnnnnnnnnnnnnnnnnnnnnnnnnnnnnnnnnnnnnnnnnnnnnnnnnnnnnnnnnnnnnnnnnnnnnnnnnnnnnnnnnnnnnnnnnnnnnnnnnnnnnnnnnnnnnnnnnnnnnnnnnnnnnnnnnnnnnnnnnnnnnnnnnnnnnnnnnnnnnnnnnnnnnnnnnnnnnnnnnnnnnnnnnnnnnnnnnnnnnnnnnnnnnnnnnnnnnnnnnnnnnnnnnnnnnnnnnnnnnnnnnnnnnnnnnnnnnnnnnnnnnnnnnnnnnnnnnnnnnnnnnnnnnnnnnnnnnnnnnnnnnnnnnnnnnnnnnnnnnnnnnnnnnnnnnnnnnnnnnnnnnnnnnnnnnnnnnnnnnnnnnnnnnnnnnnnnnnnnnnnnnnnnnnnnnnnnnnnnnnnnnnnnnnnnnnnnnnnnnnnnnnnnnnnnnnnnnnnnnnnnnnnnnnnnnnnnnnnnnnnnnnnnnnnnnnnnnnnnnnnnnnnnnnnnnnnnnnnnnnnnnnnnnnnnnnnnnnnnnnnnnnnnnnnnnnnnnnnnnnnnnnnnnnnnnnnnnnnnnnnnnnnnnnnnnnnnnnnnnnnnnnnnnnnnnnnnnnnnnnnnnnnnnnnnnnnnnnnnnnnnnnnnnnnnnnnnnnnnnnnnnnnnnnnnnnnnnnnnnnnnnnnnnnnnnnnnnnnnnnnnnnnnnnnnnnnnnnnnnnnnnnnnnnnnnnnnnnnnnnnnnnnnnnnnnnnnnnnnnnnnnnnnnnnnnnnnnnnnnnnnnnnnnnnnnnnnnnnnnnnnnnnnnnnnnnnnnnnnnnnnnnnnnnnnnnnnnnnnnnnnnnnnnnnnnnnnnnnnnnnnnnnnnnnnnnnnnnnnnnnnnnnnnnnnnnnnnnnnnnnnnnnnnnnnnnnnnnnnnnnnnnnnnnnnnnnnnnnnnnnnnnnnnnnnnnnnnnnnnnnnnnnnnnnnnnnnnnnnnnnnnnnnnnnnnnnnnnnnnnnnnnnnnnnnnnnnnnnnnnnnnnnnnnnnnnnnnnnnnnnnnnnnnnnnnnnnnnnnnnnnnnnnnnnnnnnnnnnnnnnnnnnnnnnnnnnnnnnnnnnnnnnnnnnnnnnnnnnnnnnnnnnnnnnnnnnnnnnnnnnnnnnnnnnnnnnnnnnnnnnnnnnnnnnnnnnnnnnnnnnnnnnnnnnnnnnnnnnnnnnnnnnnnnnnnnnnnnnnnnnnnnnnnnnnnnnnnnnnnnnnnnnnnnnnnnnnnnnnnnnnnnnnnnnnnnnnnnnnnnnnnnnnnnnnnnnnnnnnnnnnnnnnnnnnnnnnnnnnnnnnnnnnnnnnnnnnnnnnnnnnnnnnnnnnnnnnnnnnnnnnnnnnnnnnnnnnnnnnnnnnnnnnnnnnnnnnnnnnnnnnnnnnnnnnnnnnnnnnnnnnnnnnnnnnnnnnnnnnnnnnnnnnnnnnnnnnnnnnnnnnnnnnnnnnnnnnnnnnnnnnnnnnnnnnnnnnnnnnnnnnnnnnnnnnnnnnnnnnnnnnnnnnnnnnnnnnnnnnnnnnnnnnnnnnnnnnnnnnnnnnnnnnnnnnnnnnnnnnnnnnnnnnnnnnnnnnnnnnnnnnnnnnnnnnnnnnnnnnnnnnnnnnnnnnnnnnnnnnnnnnnnnnnnnnnnnnnnnnnnnnnnnnnnnnnnnnnnnnnnnnnnnnnnnnnnnnnnnnnnnnnnnnnnnnnnnnnnnnnnnnnnnnnnnnnnnnnnnnnnnnnnnnnnnnnnnnnnnnnnnnnnnnnnnnnnnnnnnnnnnnnnnnnnnnnnnnnnnnnnnnnnnnnnnnnnnnnnnnnnnnnnnnnnnnnnnnnnnnnnnnnnnnnnnnnnnnnnnnnnnnnnnnnnnnnnnnnnnnnnnnnnnnnnnnnnnnnnnnnnnnnnnnnnnnnnnnnnnnnnnnnnnnnnnnnnnnnnnnnnnnnnnnnnnnnnnnnnnnnnnnnnnnnnnnnnnnnnnnnnnnnnnnnnnnnnnnnnnnnnnnnnnnnnnnnnnnnnnnnnnnnnnnnnnnnnnnnnnnnnnnnnnnnnnnnnnnnnnnnnnnnnnnnnnnnnnnnnnnnnnnnnnnnnnnnnnnnnnnnnnnnnnnnnnnnnnnnnnnnnnnnnnnnnnnnnnnnnnnnnnnnnnnnnnnnnnnnnnnnnnnnnnnnnnnnnnnnnnnnnnnnnnnnnnnnnnnnnnnnnnnnnnnnnnnnnnnnnnnnnnnnnnnnnnnnnnnnnnnnnnnnnnnnnnnnnnnnnnnnnnnnnnnnnnnnnnnnnnnnnnnnnnnnnnnnnnnnnnnnnnnnnnnnnnnnnnnnnnnnnnnnnnnnnnnnnnnnnnnnnnnnnnnnnnnnnnnnnnnnnnnnnnnnnnnnnnnnnnnnnnnnnnnnnnnnnnnnnnnnnnnnnnnnnnnnnnnnnnnnnnnnnnnnnnnnnnnnnnnnnnnnnnnnnnnnnnnnnnnnnnnnnnnnnnnnnnnnnnnnnnnnnnnnnnnnnnnnnnnnnnnnnnnnnnnnnnnnnnnnnnnnnnnnnnnnnnnnnnnnnnnnnnnnnnnnnnnnnnnnnnnnnnnnnnnnnnnnnnnnnnnnnnnnnnnnnnnnnnnnnnnnnnnnnnnnnnnnnnnnnnnnnnnnnnnnnnnnnnnnnnnnnnnnnnnnnnnnnnnnnnnnnnnnnnnnnnnnnnnnnnnnnnnnnnnnnnnnnnnnnnnnnnnnnnnnnnnnnnnnnnnnnnnnnnnnnnnnnnnnnnnnnnnnnnnnnnnnnnnnnnnnnnnnnnnnnnnnnnnnnnnnnnnnnnnnnnnnnnnnnnnnnnnnnnnnnnnnnnnnnnnnnnnnnnnnnnnnnnnnnnnnnnnnnnnnnnnnnnnnnnnnnnnnnnnnnnnnnnnnnnnnnnnnnnnnnnnnnnnnnnnnnnnnnnnnnnnnnnnnnnnnnnnnnnnnnnnnnnnnnnnnnnnnnnnnnnnnnnnnnnnnnnnnnnnnnnnnnnnnnnnnnnnnnnnnnnnnnnnnnnnnnnnnnnnnnnnnnnnnnnnnnnnnnnnnnnnnnnnnnnnnnnnnnnnnnnnnnnnnnnnnnnnnnnnnnnnnnnnnnnnnnnnnnnnnnnnnnnnnnnnnnnnnnnnnnnnnnnnnnnnnnnnnnnnnnnnnnnnnnnnnnnnnnnnnnnnnnnnnnnnnnnnnnnnnnnnnnnnnnnnnnnnnnnnnnnnnnnnnnnnnnnnnnnnnnnnnnnnnnnnnnnnnnnnnnnnnnnnnnnnnnnnnnnnnnnnnnnnnnnnnnnnnnnnnnnnnnnnnnnnnnnnnnnnnnnnnnnnnnnnnnnnnnnnnnnnnnnnnnnnnnnnnnnnnnnnnnnnnnnnnnnnnnnnnnnnnnnnnnnnnnnnnnnnnnnnnnnnnnnnnnnnnnnnnnnnnnnnnnnnnnnnnnnnnnnnnnnnnnnnnnnnnnnnnnnnnnnnnnnnnnnnnnnnnnnnnnnnnnnnnnnnnnnnnnnnnnnnnnnnnnnnnnnnnnnnnnnnnnnnnnnnnnnnnnnnnnnnnnnnnnnnnnnnnnnnnnnnnnnnnnnnnnnnnnnnnnnnnnnnnnnnnnnnnnnnnnnnnnnnnnnnnnnnnnnnnnnnnnnnnnnnnnnnnnnnnnnnnnnnnnnnnnnnnnnnnnnnnnnnnnnnnnnnnnnnnnnnnnnnnnnnnnnnnnnnnnnnnnnnnnnnnnnnnnnnnnnnnnnnnnnnnnnnnnnnnnnnnnnnnnnnnnnnnnnnnnnnnnnnnnnnnnnnnnnnnnnnnnnnnnnnnnnnnnnnnnnnnnnnnnnnnnnnnnnnnnnnnnnnnnnnnnnnnnnnnnnnnnnnnnnnnnnnnnnnnnnnnnnnnnnnnnnnnnnnnnnnnnnnnnnnnnnnnnnnnnnnnnnnnnnnnnnnnnnnnnnnnnnnnnnnnnnnnnnnnnnnnnnnnnnnnnnnnnnnnnnnnnnnnnnnnnnnnnnnnnnnnnnnnnnnnnnnnnnnnnnnnnnnnnnnnnnnnnnnnnnnnnnnnnnnnnnnnnnnnnnnnnnnnnnnnnnnnnnnnnnnnnnnnnnnnnnnnnnnnnnnnnnnnnnnnnnnnnnnnnnnnnnnnnnnnnnnnnnnnnnnnnnnnnnnnnnnnnnnnnnnnnnnnnnnnnnnnnnnnnnnnnnnnnnnnnnnnnnnnnnnnnnnnnnnnnnnnnnnnnnnnnnnnnnnnnnnnnnnnnnnnnnnnnnnnnnnnnnnnnnnnnnnnnnnnnnnnnnnnnnnnnnnnnnnnnnnnnnnnnnnnnnnnnnnnnnnnnnnnnnnnnnnnnnnnnnnnnnnnnnnnnnnnnnnnnnnnnnnnnnnnnnnnnnnnnnnnnnnnnnnnnnnnnnnnnnnnnnnnnnnnnnnnnnnnnnnnnnnnnnnnnnnnnnnnnnnnnnnnnnnnnnnnnnnnnnnnnnnnnnnnnnnnnnnnnnnnnnnnnnnnnnnnnnnnnnnnnnnnnnnnnnnnnnnnnnnnnnnnnnnnnnnnnnnnnnnnnnnnnnnnnnnnnnnnnnnnnnnnnnnnnnnnnnnnnnnnnnnnnnnnnnnnnnnnnnnnnnnnnnnnnnnnnnnnnnnnnnnnnnnnnnnnnnnnnnnnnnnnnnnnnnnnnnnnnnnnnnnnnnnnnnnnnnnnnnnnnnnnnnnnnnnnnnnnnnnnnnnnnnnnnnnnnnnnnnnnnnnnnnnnnnnnnnnnnnnnnnnnnnnnnnnnnnnnnnnnnnnnnnnnnnnnnnnnnnnnnnnnnnnnnnnnnnnnnnnnnnnnnnnnnnnnnnnnnnnnnnnnnnnnnnnnnnnnnnnnnnnnnnnnnnnnnnnnnnnnnnnnnnnnnnnnnnnnnnnnnnnnnnnnnnnnnnnnnnnnnnnnnnnnnnnnnnnnnnnnnnnnnnnnnnnnnnnnnnnnnnnnnnnnnnnnnnnnnnnnnnnnnnnnnnnnnnnnnnnnnnnnnnnnnnnnnnnnnnnnnnnnnnnnnnnnnnnnnnnnnnnnnnnnnnnnnnnnnnnnnnnnnnnnnnnnnnnnnnnnnnnnnnnnnnnnnnnnnnnnnnnnnnnnnnnnnnnnnnnnnnnnnnnnnnnnnnnnnnnnnnnnnnnnnnnnnnnnnnnnnnnnnnnnnnnnnnnnnnnnnnnnnnnnnnnnnnnnnnnnnnnnnnnnnnnnnnnnnnnnnnnnnnnnnnnnnnnnnnnnnnnnnnnnnnnnnnnnnnnnnnnnnnnnnnnnnnnnnnnnnnnnnnnnnnnnnnnnnnnnnnnnnnnnnnnnnnnnnnnnnnnnnnnnnnnnnnnnnnnnnnnnnnnnnnnnnnnnnnnnnnnnnnnnnnnnnnnnnnnnnnnnnnnnnnnnnnnnnnnnnnnnnnnnnnnnnnnnnnnnnnnnnnnnnnnnnnnnnnnnnnnnnnnnnnnnnnnnnnnnnnnnnnnnnnnnnnnnnnnnnnnnnnnnnnnnnnnnnnnnnnnnnnnnnnnnnnnnnnnnnnnnnnnnnnnnnnnnnnnnnnnnnnnnnnnnnnnnnnnnnnnnnnnnnnnnnnnnnnnnnnnnnnnnnnnnnnnnnnnnnnnnnnnnnnnnnnnnnnnnnnnnnnnnnnnnnnnnnnnnnnnnnnnnnnnnnnnnnnnnnnnnnnnnnnnnnnnnnnnnnnnnnnnnnnnnnnnnnnnnnnnnnnnnnnnnnnnnnnnnnnnnnnnnnnnnnnnnnnnnnnnnnnnnnnnnnnnnnnnnnnnnnnnnnnnnnnnnnnnnnnnnnnnnnnnnnnnnnnnnnnnnnnnnnnnnnnnnnnnnnnnnnnnnnnnnnnnnnnnnnnnnnnnnnnnnnnnnnnnnnnnnnnnnnnnnnnnnnnnnnnnnnnnnnnnnnnnnnnnnnnnnnnnnnnnnnnnnnnnnnnnnnnnnnnnnnnnnnnnnnnnnnnnnnnnnnnnnnnnnnnnnnnnnnnnnnnnnnnnnnnnnnnnnnnnnnnnnnnnnnnnnnnnnnnnnnnnnnnnnnnnnnnnnnnnnnnnnnnnnnnnnnnnnnnnnnnnnnnnnnnnnnnnnnnnnnnnnnnnnnnnnnnnnnnnnnnnnnnnnnnnnnnnnnnnnnnnnnnnnnnnnnnnnnnnnnnnnnnnnnnnnnnnnnnnnnnnnnnnnnnnnnnnnnnnnnnnnnnnnnnnnnnnnnnnnnnnnnnnnnnnnnnnnnnnnnnnnnnnnnnnnnnnnnnnnnnnnnnnnnnnnnnnnnnnnnnnnnnnnnnnnnnnnnnnnnnnnnnnnnnnnnnnnnnnnnnnnnnnnnnnnnnnnnnnnnnnnnnnnnnnnnnnnnnnnnnnnnnnnnnnnnnnnnnnnnnnnnnnnnnnnnnnnnnnnnnnnnnnnnnnnnnnnnnnnnnnnnnnnnnnnnnnnnnnnnnnnnnnnnnnnnnnnnnnnnnnnnnnnnnnnnnnnnnnnnnnnnnnnnnnnnnnnnnnnnnnnnnnnnnnnnnnnnnnnnnnnnnnnnnnnnnnnnnnnnnnnnnnnnnnnnnnnnnnnnnnnnnnnnnnnnnnnnnnnnnnnnnnnnnnnnnnnnnnnnnnnnnnnnnnnnnnnnnnnnnnnnnnnnnnnnnnnnnnnnnnnnnnnnnnnnnnnnnnnnnnnnnnnnnnnnnnnnnnnnnnnnnnnnnnnnnnnnnnnnnnnnnnnnnnnnnnnnnnnnnnnnnnnnnnnnnnnnnnnnnnnnnnnnnnnnnnnnnnnnnnnnnnnnnnnnnnnnnnnnnnnnnnnnnnnnnnnnnnnnnnnnnnnnnnnnnnnnnnnnnnnnnnnnnnnnnnnnnnnnnnnnnnnnnnnnnnnnnnnnnnnnnnnnnnnnnnnnnnnnnnnnnnnnnnnnnnnnnnnnnnnnnnnnnnnnnnnnnnnnnnnnnnnnnnnnnnnnnnnnnnnnnnnnnnnnnnnnnnnnnnnnnnnnnnnnnnnnnnnnnnnnnnnnnnnnnnnnnnnnnnnnnnnnnnnnnnnnnnnnnnnnnnnnnnnnnnnnnnnnnnnnnnnnnnnnnnnnnnnnnnnnnnnnnnnnnnnnnnnnnnnnnnnnnnnnnnnnnnnnnnnnnnnnnnnnnnnnnnnnnnnnnnnnnnnnnnnnnnnnnnnnnnnnnnnnnnnnnnnnnnnnnnnnnnnnnnnnnnnnnnnnnnnnnnnnnnnnnnnnnnnnnnnnnnnnnnnnnnnnnnnnnnnnnnnnnnnnnnnnnnnnnnnnnnnnnnnnnnnnnnnnnnnnnnnnnnnnnnnnnnnnnnnnnnnnnnnnnnnnnnnnnnnnnnnnnnnnnnnnnnnnnnnnnnnnnnnnnnnnnnnnnnnnnnnnnnnnnnnnnnnnnnnnnnnnnnnnnnnnnnnnnnnnnnnnnnnnnnnnnnnnnnnnnnnnnnnnnnnnnnnnnnnnnnnnnnnnnnnnnnnnnnnnnnnnnnnnnnnnnnnnnnnnnnnnnnnnnnnnnnnnnnnnnnnnnnnnnnnnnnnnnnnnnnnnnnnnnnnnnnnnnnnnnnnnnnnnnnnnnnnnnnnnnnnnnnnnnnnnnnnnnnnnnnnnnnnnnnnnnnnnnnnnnnnnnnnnnnnnnnnnnnnnnnnnnnnnnnnnnnnnnnnnnnnnnnnnnnnnnnnnnnnnnnnnnnnnnnnnnnnnnnnnnnnnnnnnnnnnnnnnnnnnnnnnnnnnnnnnnnnnnnnnnnnnnnnnnnnnnnnnnnnnnnnnnnnnnnnnnnnnnnnnnnnnnnnnnnnnnnnnnnnnnnnnnnnnnnnnnnnnnnnnnnnnnnnnnnnnnnnnnnnnnnnnnnnnnnnnnnnnnnnnnnnnnnnnnnnnnnnnnnnnnnnnnnnnnnnnnnnnnnnnnnnnnnnnnnnnnnnnnnnnnnnnnnnnnnnnnnnnnnnnnnnnnnnnnnnnnnnnnnnnnnnnnnnnnnnnnnnnnnnnnnnnnnnnnnnnnnnnnnnnnnnnnnnnnnnnnnnnnnnnnnnnnnnnnnnnnnnnnnnnnnnnnnnnnnnnnnnnnnnnnnnnnnnnnnnnnnnnnnnnnnnnnnnnnnnnnnnnnnnnnnnnnnnnnnnnnnnnnnnnnnnnnnnnnnnnnnnnnnnnnnnnnnnnnnnnnnnnnnnnnnnnnnnnnnnnnnnnnnnnnnnnnnnnnnnnnnnnnnnnnnnnnnnnnnnnnnnnnnnnnnnnnnnnnnnnnnnnnnnnnnnnnnnnnnnnnnnnnnnnnnnnnnnnnnnnnnnnnnnnnnnnnnnnnnnnnnnnnnnnnnnnnnnnnnnnnnnnnnnnnnnnnnnnnnnnnnnnnnnnnnnnnnnnnnnnnnnnnnnnnnnnnnnnnnnnnnnnnnnnnnnnnnnnnnnnnnnnnnnnnnnnnnnnnnnnnnnnnnnnnnnnnnnnnnnnnnnnnnnnnnnnnnnnnnnnnnnnnnnnnnnnnnnnnnnnnnnnnnnnnnnnnnnnnnnnnnnnnnnnnnnnnnnnnnnnnnnnnnnnnnnnnnnnnnnnnnnnnnnnnnnnnnnnnnnnnnnnnnnnnnnnnnnnnnnnnnnnnnnnnnnnnnnnnnnnnnnnnnnnnnnnnnnnnnnnnnnnnnnnnnnnnnnnnnnnnnnnnnnnnnnnnnnnnnnnnnnnnnnnnnnnnnnnnnnnnnnnnnnnnnnnnnnnnnnnnnnnnnnnnnnnnnnnnnnnnnnnnnnnnnnnnnnnnnnnnnnnnnnnnnnnnnnnnnnnnnnnnnnnnnnnnnnnnnnnnnnnnnnnnnnnnnnnnnnnnnnnnnnnnnnnnnnnnnnnnnnnnnnnnnnnnnnnnnnnnnnnnnnnnnnnnnnnnnnnnnnnnnnnnnnnnnnnnnnnnnnnnnnnnnnnnnnnnnnnnnnnnnnnnnnnnnnnnnnnnnnnnnnnnnnnnnnnnnnnnnnnnnnnnnnnnnnnnnnnnnnnnnnnnnnnnnnnnnnnnnnnnnnnnnnnnnnnnnnnnnnnnnnnnnnnnnnnnnnnnnnnnnnnnnnnnnnnnnnnnnnnnnnnnnnnnnnnnnnnnnnnnnnnnnnnnnnnnnnnnnnnnnnnnnnnnnnnnnnnnnnnnnnnnnnnnnnnnnnnnnnnnnnnnnnnnnnnnnnnnnnnnnnnnnnnnnnnnnnnnnnnnnnnnnnnnnnnnnnnnnnnnnnnnnnnnnnnnnnnnnnnnnnnnnnnnnnnnnnnnnnnnnnnnnnnnnnnnnnnnnnnnnnnnnnnnnnnnnnnnnnnnnnnnnnnnnnnnnnnnnnnnnnnnnnnnnnnnnnnnnnnnnnnnnnnnnnnnnnnnnnnnnnnnnnnnnnnnnnnnnnnnnnnnnnnnnnnnnnnnnnnnnnnnnnnnnnnnnnnnnnnnnnnnnnnnnnnnnnnnnnnnnnnnnnnnnnnnnnnnnnnnnnnnnnnnnnnnnnnnnnnnnnnnnnnnnnnnnnnnnnnnnnnnnnnnnnnnnnnnnnnnnnnnnnnnnnnnnnnnnnnnnnnnnnnnnnnnnnnnnnnnnnnnnnnnnnnnnnnnnnnnnnnnnnnnnnnnnnnnnnnnnnnnnnnnnnnnnnnnnnnnnnnnnnnnnnnnnnnnnnnnnnnnnnnnnnnnnnnnnnnnnnnnnnnnnnnnnnnnnnnnnnnnnnnnnnnnnnnnnnnnnnnnnnnnnnnnnnnnnnnnnnnnnnnnnnnnnnnnnnnnnnnnnnnnnnnnnnnnnnnnnnnnnnnnnnnnnnnnnnnnnnnnnnnnnnnnnnnnnnnnnnnnnnnnnnnnnnnnnnnnnnnnnnnnnnnnnnnnnnnnnnnnnnnnnnnnnnnnnnnnnnnnnnnnnnnnnnnnnnnnnnnnnnnnnnnnnnnnnnnnnnnnnnnnnnnnnnnnnnnnnnnnnnnnnnnnnnnnnnnnnnnnnnnnnnnnnnnnnnnnnnnnnnnnnnnnnnnnnnnnnnnnnnnnnnnnnnnnnnnnnnnnnnnnnnnnnnnnnnnnnnnnnnnnnnnnnnnnnnnnnnnnnnnnnnnnnnnnnnnnnnnnnnnnnnnnnnnnnnnnnnnnnnnnnnnnnnnnnnnnnnnnnnnnnnnnnnnnnnnnnnnnnnnnnnnnnnnnnnnnnnnnnnnnnnnnnnnnnnnnnnnnnnnnnnnnnnnnnnnnnnnnnnnnnnnnnnnnnnnnnnnnnnnnnnnnnnnnnnnnnnnnnnnnnnnnnnnnnnnnnnnnnnnnnnnnnnnnnnnnnnnnnnnnnnnnnnnnnnnnnnnnnnnnnnnnnnnnnnnnnnnnnnnnnnnnnnnnnnnnnnnnnnnnnnnnnnnnnnnnnnnnnnnnnnnnnnnnnnnnnnnnnnnnnnnnnnnnnnnnnnnnnnnnnnnnnnnnnnnnnnnnnnnnnnnnnnnnnnnnnnnnnnnnnnnnnnnnnnnnnnnnnnnnnnnnnnnnnnnnnnnnnnnnnnnnnnnnnnnnnnnnnnnnnnnnnnnnnnnnnnnnnnnnnnnnnnnnnnnnnnnnnnnnnnnnnnnnnnnnnnnnnnnnnnnnnnnnnnnnnnnnnnnnnnnnnnnnnnnnnnnnnnnnnnnnnnnnnnnnnnnnnnnnnnnnnnnnnnnnnnnnnnnnnnnnnnnnnnnnnnnnnnnnnnnnnnnnnnnnnnnnnnnnnnnnnnnnnnnnnnnnnnnnnnnnnnnnnnnnnnnnnnnnnnnnnnnnnnnnnnnnnnnnnnnnnnnnnnnnnnnnnnnnnnnnnnnnnnnnnnnnnnnnnnnnnnnnnnnnnnnnnnnnnnnnnnnnnnnnnnnnnnnnnnnnnnnnnnnnnnnnnnnnnnnnnnnnnnnnnnnnnnnnnnnnnnnnnnnnnnnnnnnnnnnnnnnnnnnnnnnnnnnnnnnnnnnnnnnnnnnnnnnnnnnnnnnnnnnnnnnnnnnnnnnnnnnnnnnnnnnnnnnnnnnnnnnnnnnnnnnnnnnnnnnnnnnnnnnnnnnnnnnnnnnnnnnnnnnnnnnnnnnnnnnnnnnnnnnnnnnnnnnnnnnnnnnnnnnnnnnnnnnnnnnnnnnnnnnnnnnnnnnnnnnnnnnnnnnnnnnnnnnnnnnnnnnnnnnnnnnnnnnnnnnnnnnnnnnnnnnnnnnnnnnnnnnnnnnnnnnnnnnnnnnnnnnnnnnnnnnnnnnnnnnnnnnnnnnnnnnnnnnnnnnnnnnnnnnnnnnnnnnnnnnnnnnnnnnnnnnnnnnnnnnnnnnnnnnnnnnnnnnnnnnnnnnnnnnnnnnnnnnnnnnnnnnnnnnnnnnnnnnnnnnnnnnnnnnnnnnnnnnnnnnnnnnnnnnnnnnnnnnnnnnnnnnnnnnnnnnnnnnnnnnnnnnnnnnnnnnnnnnnnnnnnnnnnnnnnnnnnnnnnnnnnnnnnnnnnnnnnnnnnnnnnnnnnnnnnnnnnnnnnnnnnnnnnnnnnnnnnnnnnnnnnnnnnnnnnnnnnnnnnnnnnnnnnnnnnnnnnnnnnnnnnnnnnnnnnnnnnnnnnnnnnnnnnnnnnnnnnnnnnnnnnnnnnnnnnnnnnnnnnnnnnnnnnnnnnnnnnnnnnnnnnnnnnnnnnnnnnnnnnnnnnnnnnnnnnnnnnnnnnnnnnnnnnnnnnnnnnnnnnnnnnnnnnnnnnnnnnnnnnnnnnnnnnnnnnnnnnnnnnnnnnnnnnnnnnnnnnnnnnnnnnnnnnnnnnnnnnnnnnnnnnnnnnnnnnnnnnnnnnnnnnnnnnnnnnnnnnnnnnnnnnnnnnnnnnnnnnnnnnnnnnnnnnnnnnnnnnnnnnnnnnnnnnnnnnnnnnnnnnnnnnnnnnnnnnnnnnnnnnnnnnnnnnnnnnnnnnnnnnnnnnnnnnnnnnnnnnnnnnnnnnnnnnnnnnnnnnnnnnnnnnnnnnnnnnnnnnnnnnnnnnnnnnnnnnnnnnnnnnnnnnnnnnnnnnnnnnnnnnnnnnnnnnnnnnnnnnnnnnnnnnnnnnnnnnnnnnnnnnnnnnnnnnnnnnnnnnnnnnnnnnnnnnnnnnnnnnnnnnnnnnnnnnnnnnnnnnnnnnnnnnnnnnnnnnnnnnnnnnnnnnnnnnnnnnnnnnnnnnnnnnnnnnnnnnnnnnnnnnnnnnnnnnnnnnnnnnnnnnnnnnnnnnnnnnnnnnnnnnnnnnnnnnnnnnnnnnnnnnnnnnnnnnnnnnnnnnnnnnnnnnnnnnnnnnnnnnnnnnnnnnnnnnnnnnnnnnnnnnnnnnnnnnnnnnnnnnnnnnnnnnnnnnnnnnnnnnnnnnnnnnnnnnnnnnnnnnnnnnnnnnnnnnnnnnnnnnnnnnnnnnnnnnnnnnnnnnnnnnnnnnnnnnnnnnnnnnnnnnnnnnnnnnnnnnnnnnnnnnnnnnnnnnnnnnnnnnnnnnnnnnnnnnnnnnnnnnnnnnnnnnnnnnnnnnnnnnnnnnnnnnnnnnnnnnnnnnnnnnnnnnnnnnnnnnnnnnnnnnnnnnnnnnnnnnnnnnnnnnnnnnnnnnnnnnnnnnnnnnnnnnnnnnnnnnnnnnnnnnnnnnnnnnnnnnnnnnnnnnnnnnnnnnnnnnnnnnnnnnnnnnnnnnnnnnnnnnnnnnnnnnnnnnnnnnnnnnnnnnnnnnnnnnnnnnnnnnnnnnnnnnnnnnnnnnnnnnnnnnnnnnnnnnnnnnnnnnnnnnnnnnnnnnnnnnnnnnnnnnnnnnnnnnnnnnnnnnnnnnnnnnnnnnnnnnnnnnnnnnnnnnnnnnnnnnnnnnnnnnnnnnnnnnnnnnnnnnnnnnnnnnnnnnnnnnnnnnnnnnnnnnnnnnnnnnnnnnnnnnnnnnnnnnnnnnnnnnnnnnnnnnnnnnnnnnnnnnnnnnnnnnnnnnnnnnnnnnnnnnnnnnnnnnnnnnnnnnnnnnnnnnnnnnnnnnnnnnnnnnnnnnnnnnnnnnnnnnnnnnnnnnnnnnnnnnnnnnnnnnnnnnnnnnnnnnnnnnnnnnnnnnnnnnnnnnnnnnnnnnnnnnnnnnnnnnnnnnnnnnnnnnnnnnnnnnnnnnnnnnnnnnnnnnnnnnnnnnnnnnnnnnnnnnnnnnnnnnnnnnnnnnnnnnnnnnnnnnnnnnnnnnnnnnnnnnnnnnnnnnnnnnnnnnnnnnnnnnnnnnnnnnnnnnnnnnnnnnnnnnnnnnnnnnnnnnnnnnnnnnnnnnnnnnnnnnnnnnnnnnnnnnnnnnnnnnnnnnnnnnnnnnnnnnnnnnnnnnnnnnnnnnnnnnnnnnnnnnnnnnnnnnnnnnnnnnnnnnnnnnnnnnnnnnnnnnnnnnnnnnnnnnnnnnnnnnnnnnnnnnnnnnnnnnnnnnnnnnnnnnnnnnnnnnnnnnnnnnnnnnnnnnnnnnnnnnnnnnnnnnnnnnnnnnnnnnnnnnnnnnnnnnnnnnnnnnnnnnnnnnnnnnnnnnnnnnnnnnnnnnnnnnnnnnnnnnnnnnnnnnnnnnnnnnnnnnnnnnnnnnnnnnnnnnnnnnnnnnnnnnnnnnnnnnnnnnnnnnnnnnnnnnnnnnnnnnnnnnnnnnnnnnnnnnnnnnnnnnnnnnnnnnnnnnnnnnnnnnnnnnnnnnnnnnnnnnnnnnnnnnnnnnnnnnnnnnnnnnnnnnnnnnnnnnnnnnnnnnnnnnnnnnnnnnnnnnnnnnnnnnnnnnnnnnnnnnnnnnnnnnnnnnnnnnnnnnnnnnnnnnnnnnnnnnnnnnnnnnnnnnnnnnnnnnnnnnnnnnnnnnnnnnnnnnnnnnnnnnnnnnnnnnnnnnnnnnnnnnnnnnnnnnnnnnnnnnnnnnnnnnnnnnnnnnnnnnnnnnnnnnnnnnnnnnnnnnnnnnnnnnnnnnnnnnnnnnnnnnnnnnnnnnnnnnnnnnnnnnnnnnnnnnnnnnnnnnnnnnnnnnnnnnnnnnnnnnnnnnnnnnnnnnnnnnnnnnnnnnnnnnnnnnnnnnnnnnnnnnnnnnnnnnnnnnnnnnnnnnnnnnnnnnnnnnnnnnnnnnnnnnnnnnnnnnnnnnnnnnnnnnnnnnnnnnnnnnnnnnnnnnnnnnnnnnnnnnnnnnnnnnnnnnnnnnnnnnnnnnnnnnnnnnnnnnnnnnnnnnnnnnnnnnnnnnnnnnnnnnnnnnnnnnnnnnnnnnnnnnnnnnnnnnnnnnnnnnnnnnnnnnnnnnnnnnnnnnnnnnnnnnnnnnnnnnnnnnnnnnnnnnnnnnnnnnnnnnnnnnnnnnnnnnnnnnnnnnnnnnnnnnnnnnnnnnnnnnnnnnnnnnnnnnnnnnnnnnnnnnnnnnnnnnnnnnnnnnnnnnnnnnnnnnnnnnnnnnnnnnnnnnnnnnnnnnnnnnnnnnnnnnnnnnnnnnnnnnnnnnnnnnnnnnnnnnnnnnnnnnnnnnnnnnnnnnnnnnnnnnnnnnnnnnnnnnnnnnnnnnnnnnnnnnnnnnnnnnnnnnnnnnnnnnnnnnnnnnnnnnnnnnnnnnnnnnnnnnnnnnnnnnnnnnnnnnnnnnnnnnnnnnnnnnnnnnnnnnnnnnnnnnnnnnnnnnnnnnnnnnnnnnnnnnnnnnnnnnnnnnnnnnnnnnnnnnnnnnnnnnnnnnnnnnnnnnnnnnnnnnnnnnnnnnnnnnnnnnnnnnnnnnnnnnnnnnnnnnnnnnnnnnnnnnnnnnnnnnnnnnnnnnnnnnnnnnnnnnnnnnnnnnnnnnnnnnnnnnnnnnnnnnnnnnnnnnnnnnnnnnnnnnnnnnnnnnnnnnnnnnnnnnnnnnnnnnnnnnnnnnnnnnnnnnnnnnnnnnnnnnnnnnnnnnnnnnnnnnnnnnnnnnnnnnnnnnnnnnnnnnnnnnnnnnnnnnnnnnnnnnnnnnnnnnnnnnnnnnnnnnnnnnnnnnnnnnnnnnnnnnnnnnnnnnnnnnnnnnnnnnnnnnnnnnnnnnnnnnnnnnnnnnnnnnnnnnnnnnnnnnnnnnnnnnnnnnnnnnnnnnnnnnnnnnnnnnnnnnnnnnnnnnnnnnnnnnnnnnnnnnnnnnnnnnnnnnnnnnnnnnnnnnnnnnnnnnnnnnnnnnnnnnnnnnnnnnnnnnnnnnnnnnnnnnnnnnnnnnnnnnnnnnnnnnnnnnnnnnnnnnnnnnnnnnnnnnnnnnnnnnnnnnnnnnnnnnnnnnnnnnnnnnnnnnnnnnnnnnnnnnnnnnnnnnnnnnnnnnnnnnnnnnnnnnnnnnnnnnnnnnnnnnnnnnnnnnnnnnnnnnnnnnnnnnnnnnnnnnnnnnnnnnnnnnnnnnnnnnnnnnnnnnnnnnnnnnnnnnnnnnnnnnnnnnnnnnnnnnnnnnnnnnnnnnnnnnnnnnnnnnnnnnnnnnnnnnnnnnnnnnnnnnnnnnnnnnnnnnnnnnnnnnnnnnnnnnnnnnnnnnnnnnnnnnnnnnnnnnnnnnnnnnnnnnnnnnnnnnnnnnnnnnnnnnnnnnnnnnnnnnnnnnnnnnnnnnnnnnnnnnnnnnnnnnnnnnnnnnnnnnnnnnnnnnnnnnnnnnnnnnnnnnnnnnnnnnnnnnnnnnnnnnnnnnnnnnnnnnnnnnnnnnnnnnnnnnnnnnnnnnnnnnnnnnnnnnnnnnnnnnnnnnnnnnnnnnnnnnnnnnnnnnnnnnnnnnnnnnnnnnnnnnnnnnnnnnnnnnnnnnnnnnnnnnnnnnnnnnnnnnnnnnnnnnnnnnnnnnnnnnnnnnnnnnnnnnnnnnnnnnnnnnnnnnnnnnnnnnnnnnnnnnnnnnnnnnnnnnnnnnnnnnnnnnnnnnnnnnnnnnnnnnnnnnnnnnnnnnnnnnnnnnnnnnnnnnnnnnnnnnnnnnnnnnnnnnnnnnnnnnnnnnnnnnnnnnnnnnnnnnnnnnnnnnnnnnnnnnnnnnnnnnnnnnnnnnnnnnnnnnnnnnnnnnnnnnnnnnnnnnnnnnnnnnnnnnnnnnnnnnnnnnnnnnnnnnnnnnnnnnnnnnnnnnnnnnnnnnnnnnnnnnnnnnnnnnnnnnnnnnnnnnnnnnnnnnnnnnnnnnnnnnnnnnnnnnnnnnnnnnnnnnnnnnnnnnnnnnnnnnnnnnnnnnnnnnnnnnnnnnnnnnnnnnnnnnnnnnnnnnnnnnnnnnnnnnnnnnnnnnnnnnnnnnnnnnnnnnnnnnnnnnnnnnnnnnnnnnnnnnnnnnnnnnnnnnnnnnnnnnnnnnnnnnnnnnnnnnnnnnnnnnnnnnnnnnnnnnnnnnnnnnnnnnnnnnnnnnnnnnnnnnnnnnnnnnnnnnnnnnnnnnnnnnnnnnnnnnnnnnnnnnnnnnnnnnnnnnnnnnnnnnnnnnnnnnnnnnnnnnnnnnnnnnnnnnnnnnnnnnnnnnnnnnnnnnnnnnnnnnnnnnnnnnnnnnnnnnnnnnnnnnnnnnnnnnnnnnnnnnnnnnnnnnnnnnnnnnnnnnnnnnnnnnnnnnnnnnnnnnnnnnnnnnnnnnnnnnnnnnnnnnnnnnnnnnnnnnnnnnnnnnnnnnnnnnnnnnnnnnnnnnnnnnnnnnnnnnnnnnnnnnnnnnnnnnnnnnnnnnnnnnnnnnnnnnnnnnnnnnnnnnnnnnnnnnnnnnnnnnnnnnnnnnnnnnnnnnnnnnnnnnnnnnnnnnnnnnnnnnnnnnnnnnnnnnnnnnnnnnnnnnnnnnnnnnnnnnnnnnnnnnnnnnnnnnnnnnnnnnnnnnnnnnnnnnnnnnnnnnnnnnnnnnnnnnnnnnnnnnnnnnnnnnnnnnnnnnnnnnnnnnnnnnnnnnnnnnnnnnnnnnnnnnnnnnnnnnnnnnnnnnnnnnnnnnnnnnnnnnnnnnnnnnnnnnnnnnnnnnnnnnnnnnnnnnnnnnnnnnnnnnnnnnnnnnnnnnnnnnnnnnnnnnnnnnnnnnnnnnnnnnnnnnnnnnnnnnnnnnnnnnnnnnnnnnnnnnnnnnnnnnnnnnnnnnnnnnnnnnnnnnnnnnnnnnnnnnnnnnnnnnnnnnnnnnnnnnnnnnnnnnnnnnnnnnnnnnnnnnnnnnnnnnnnnnnnnnnnnnnnnnnnnnnnnnnnnnnnnnnnnnnnnnnnnnnnnnnnnnnnnnnnnnnnnnnnnnnnnnnnnnnnnnnnnnnnnnnnnnnnnnnnnnnnnnnnnnnnnnnnnnnnnnnnnnnnnnnnnnnnnnnnnnnnnnnnnnnnnnnnnnnnnnnnnnnnnnnnnnnnnnnnnnnnnnnnnnnnnnnnnnnnnnnnnnnnnnnnnnnnnnnnnnnnnnnnnnnnnnnnnnnnnnnnnnnnnnnnnnnnnnnnnnnnnnnnnnnnnnnnnnnnnnnnnnnnnnnnnnnnnnnnnnnnnnnnnnnnnnnnnnnnnnnnnnnnnnnnnnnnnnnnnnnnnnnnnnnnnnnnnnnnnnnnnnnnnnnnnnnnnnnnnnnnnnnnnnnnnnnnnnnnnnnnnnnnnnnnnnnnnnnnnnnnnnnnnnnnnnnnnnnnnnnnnnnnnnnnnnnnnnnnnnnnnnnnnnnnnnnnnnnnnnnnnnnnnnnnnnnnnnnnnnnnnnnnnnnnnnnnnnnnnnnnnnnnnnnnnnnnnnnnnnnnnnnnnnnnnnnnnnnnnnnnnnnnnnnnnnnnnnnnnnnnnnnnnnnnnnnnnnnnnnnnnnnnnnnnnnnnnnnnnnnnnnnnnnnnnnnnnnnnnnnnnnnnnnnnnnnnnnnnnnnnnnnnnnnnnnnnnnnnnnnnnnnnnnnnnnnnnnnnnnnnnnnnnnnnnnnnnnnnnnnnnnnnnnnnnnnnnnnnnnnnnnnnnnnnnnnnnnnnnnnnnnnnnnnnnnnnnnnnnnnnnnnnnnnnnnnnnnnnnnnnnnnnnnnnnnnnnnnnnnnnnnnnnnnnnnnnnnnnnnnnnnnnnnnnnnnnnnnnnnnnnnnnnnnnnnnnnnnnnnnnnnnnnnnnnnnnnnnnnnnnnnnnnnnnnnnnnnnnnnnnnnnnnnnnnnnnnnnnnnnnnnnnnnnnnnnnnnnnnnnnnnnnnnnnnnnnnnnnnnnnnnnnnnnnnnnnnnnnnnnnnnnnnnnnnnnnnnnnnnnnnnnnnnnnnnnnnnnnnnnnnnnnnnnnnnnnnnnnnnnnnnnnnnnnnnnnnnnnnnnnnnnnnnnnnnnnnnnnnnnnnnnnnnnnnnnnnnnnnnnnnnnnnnnnnnnnnnnnnnnnnnnnnnnnnnnnnnnnnnnnnnnnnnnnnnnnnnnnnnnnnnnnnnnnnnnnnnnnnnnnnnnnnnnnnnnnnnnnnnnnnnnnnnnnnnnnnnnnnnnnnnnnnnnnnnnnnnnnnnnnnnnnnnnnnnnnnnnnnnnnnnnnnnnnnnnnnnnnnnnnnnnnnnnnnnnnnnnnnnnnnnnnnnnnnnnnnnnnnnnnnnnnnnnnnnnnnnnnnnnnnnnnnnnnnnnnnnnnnnnnnnnnnnnnnnnnnnnnnnnnnnnnnnnnnnnnnnnnnnnnnnnnnnnnnnnnnnnnnnnnnnnnnnnnnnnnnnnnnnnnnnnnnnnnnnnnnnnnnnnnnnnnnnnnnnnnnnnnnnnnnnnnnnnnnnnnnnnnnnnnnnnnnnnnnnnnnnnnnnnnnnnnnnnnnnnnnnnnnnnnnnnnnnnnnnnnnnnnnnnnnnnnnnnnnnnnnnnnnnnnnnnnnnnnnnnnnnnnnnnnnnnnnnnnnnnnnnnnnnnnnnnnnnnnnnnnnnnnnnnnnnnnnnnnnnnnnnnnnnnnnnnnnnnnnnnnnnnnnnnnnnnnnnnnnnnnnnnnnnnnnnnnnnnnnnnnnnnnnnnnnnnnnnnnnnnnnnnnnnnnnnnnnnnnnnnnnnnnnnnnnnnnnnnnnnnnnnnnnnnnnnnnnnnnnnnnnnnnnnnnnnnnnnnnnnnnnnnnnnnnnnnnnnnnnnnnnnnnnnnnnnnnnnnnnnnnnnnnnnnnnnnnnnnnnnnnnnnnnnnnnnnnnnnnnnnnnnnnnnnnnnnnnnnnnnnnnnnnnnnnnnnnnnnnnnnnnnnnnnnnnnnnnnnnnnnnnnnnnnnnnnnnnnnnnnnnnnnnnnnnnnnnnnnnnnnnnnnnnnnnnnnnnnnnnnnnnnnnnnnnnnnnnnnnnnnnnnnnnnnnnnnnnnnnnnnnnnnnnnnnnnnnnnnnnnnnnnnnnnnnnnnnnnnnnnnnnnnnnnnnnnnnnnnnnnnnnnnnnnnnnnnnnnnnnnnnnnnnnnnnnnnnnnnnnnnnnnnnnnnnnnnnnnnnnnnnnnnnnnnnnnnnnnnnnnnnnnnnnnnnnnnnnnnnnnnnnnnnnnnnnnnnnnnnnnnnnnnnnnnnnnnnnnnnnnnnnnnnnnnnnnnnnnnnnnnnnnnnnnnnnnnnnnnnnnnnnnnnnnnnnnnnnnnnnnnnnnnnnnnnnnnnnnnnnnnnnnnnnnnnnnnnnnnnnnnnnnnnnnnnnnnnnnnnnnnnnnnnnnnnnnnnnnnnnnnnnnnnnnnnnnnnnnnnnnnnnnnnnnnnnnnnnnnnnnnnnnnnnnnnnnnnnnnnnnnnnnnnnnnnnnnnnnnnnnnnnnnnnnnnnnnnnnnnnnnnnnnnnnnnnnnnnnnnnnnnnnnnnnnnnnnnnnnnnnnnnnnnnnnnnnnnnnnnnnnnnnnnnnnnnnnnnnnnnnnnnnnnnnnnnnnnnnnnnnnnnnnnnnnnnnnnnnnnnnnnnnnnnnnnnnnnnnnnnnnnnnnnnnnnnnnnnnnnnnnnnnnnnnnnnnnnnnnnnnnnnnnnnnnnnnnnnnnnnnnnnnnnnnnnnnnnnnnnnnnnnnnnnnnnnnnnnnnnnnnnnnnnnnnnnnnnnnnnnnnnnnnnnnnnnnnnnnnnnnnnnnnnnnnnnnnnnnnnnnnnnnnnnnnnnnnnnnnnnnnnnnnnnnnnnnnnnnnnnnnnnnnnnnnnnnnnnnnnnnnnnnnnnnnnnnnnnnnnnnnnnnnnnnnnnnnnnnnnnnnnnnnnnnnnnnnnnnnnnnnnnnnnnnnnnnnnnnnnnnnnnnnnnnnnnnnnnnnnnnnnnnnnnnnnnnnnnnnnnnnnnnnnnnnnnnnnnnnnnnnnnnnnnnnnnnnnnnnnnnnnnnnnnnnnnnnnnnnnnnnnnnnnnnnnnnnnnnnnnnnnnnnnnnnnnnnnnnnnnnnnnnnnnnnnnnnnnnnnnnnnnnnnnnnnnnnnnnnnnnnnnnnnnnnnnnnnnnnnnnnnnnnnnnnnnnnnnnnnnnnnnnnnnnnnnnnnnnnnnnnnnnnnnnnnnnnnnnnnnnnnnnnnnnnnnnnnnnnnnnnnnnnnnnnnnnnnnnnnnnnnnnnnnnnnnnnnnnnnnnnnnnnnnnnnnnnnnnnnnnnnnnnnnnnnnnnnnnnnnnnnnnnnnnnnnnnnnnnnnnnnnnnnnnnnnnnnnnnnnnnnnnnnnnnnnnnnnnnnnnnnnnnnnnnnnnnnnnnnnnnnnnnnnnnnnnnnnnnnnnnnnnnnnnnnnnnnnnnnnnnnnnnnnnnnnnnnnnnnnnnnnnnnnnnnnnnnnnnnnnnnnnnnnnnnnnnnnnnnnnnnnnnnnnnnnnnnnnnnnnnnnnnnnnnnnnnnnnnnnnnnnnnnnnnnnnnnnnnnnnnnnnnnnnnnnnnnnnnnnnnnnnnnnnnnnnnnnnnnnnnnnnnnnnnnnnnnnnnnnnnnnnnnnnnnnnnnnnnnnnnnnnnnnnnnnnnnnnnnnnnnnnnnnnnnnnnnnnnnnnnnnnnnnnnnnnnnnnnnnnnnnnnnnnnnnnnnnnnnnnnnnnnnnnnnnnnnnnnnnnnnnnnnnnnnnnnnnnnnnnnnnnnnnnnnnnnnnnnnnnnnnnnnnnnnnnnnnnnnnnnnnnnnnnnnnnnnnnnnnnnnnnnnnnnnnnnnnnnnnnnnnnnnnnnnnnnnnnnnnnnnnnnnnnnnnnnnnnnnnnnnnnnnnnnnnnnnnnnnnnnnnnnnnnnnnnnnnnnnnnnnnnnnnnnnnnnnnnnnnnnnnnnnnnnnnnnnnnnnnnnnnnnnnnnnnnnnnnnnnnnnnnnnnnnnnnnnnnnnnnnnnnnnnnnnnnnnnnnnnnnnnnnnnnnnnnnnnnnnnnnnnnnnnnnnnnnnnnnnnnnnnnnnnnnnnnnnnnnnnnnnnnnnnnnnnnnnnnnnnnnnnnnnnnnnnnnnnnnnnnnnnnnnnnnnnnnnnnnnnnnnnnnnnnnnnnnnnnnnnnnnnnnnnnnnnnnnnnnnnnnnnnnnnnnnnnnnnnnnnnnnnnnnnnnnnnnnnnnnnnnnnnnnnnnnnnnnnnnnnnnnnnnnnnnnnnnnnnnnnnnnnnnnnnnnnnnnnnnnnnnnnnnnnnnnnnnnnnnnnnnnnnnnnnnnnnnnnnnnnnnnnnnnnnnnnnnnnnnnnnnnnnnnnnnnnnnnnnnnnnnnnnnnnnnnnnnnnnnnnnnnnnnnnnnnnnnnnnnnnnnnnnnnnnnnnnnnnnnnnnnnnnnnnnnnnnnnnnnnnnnnnnnnnnnnnnnnnnnnnnnnnnnnnnnnnnnnnnnnnnnnnnnnnnnnnnnnnnnnnnnnnnnnnnnnnnnnnnnnnnnnnnnnnnnnnnnnnnnnnnnnnnnnnnnnnnnnnnnnnnnnnnnnnnnnnnnnnnnnnnnnnnnnnnnnnnnnnnnnnnnnnnnnnnnnnnnnnnnnnnnnnnnnnnnnnnnnnnnnnnnnnnnnnnnnnnnnnnnnnnnnnnnnnnnnnnnnnnnnnnnnnnnnnnnnnnnnnnnnnnnnnnnnnnnnnnnnnnnnnnnnnnnnnnnnnnnnnnnnnnnnnnnnnnnnnnnnnnnnnnnnnnnnnnnnnnnnnnnnnnnnnnnnnnnnnnnnnnnnnnnnnnnnnnnnnnnnnnnnnnnnnnnnnnnnnnnnnnnnnnnnnnnnnnnnnnnnnnnnnnnnnnnnnnnnnnnnnnnnnnnnnnnnnnnnnnnnnnnnnnnnnnnnnnnnnnnnnnnnnnnnnnnnnnnnnnnnnnnnnnnnnnnnnnnnnnnnnnnnnnnnnnnnnnnnnnnnnnnnnnnnnnnnnnnnnnnnnnnnnnnnnnnnnnnnnnnnnnnnnnnnnnnnnnnnnnnnnnnnnnnnnnnnnnnnnnnnnnnnnnnnnnnnnnnnnnnnnnnnnnnnnnnnnnnnnnnnnnnnnnnnnnnnnnnnnnnnnnnnnnnnnnnnnnnnnnnnnnnnnnnnnnnnnnnnnnnnnnnnnnnnnnnnnnnnnnnnnnnnnnnnnnnnnnnnnnnnnnnnnnnnnnnnnnnnnnnnnnnnnnnnnnnnnnnnnnnnnnnnnnnnnnnnnnnnnnnnnnnnnnnnnnnnnnnnnnnnnnnnnnnnnnnnnnnnnnnnnnnnnnnnnnnnnnnnnnnnnnnnnnnnnnnnnnnnnnnnnnnnnnnnnnnnnnnnnnnnnnnnnnnnnnnnnnnnnnnnnnnnnnnnnnnnnnnnnnnnnnnnnnnnnnnnnnnnnnnnnnnnnnnnnnnnnnnnnnnnnnnnnnnnnnnnnnnnnnnnnnnnnnnnnnnnnnnnnnnnnnnnnnnnnnnnnnnnnnnnnnnnnnnnnnnnnnnnnnnnnnnnnnnnnnnnnnnnnnnnnnnnnnnnnnnnnnnnnnnnnnnnnnnnnnnnnnnnnnnnnnnnnnnnnnnnnnnnnnnnnnnnnnnnnnnnnnnnnnnnnnnnnnnnnnnnnnnnnnnnnnnnnnnnnnnnnnnnnnnnnnnnnnnnnnnnnnnnnnnnnnnnnnnnnnnnnnnnnnnnnnnnnnnnnnnnnnnnnnnnnnnnnnnnnnnnnnnnnnnnnnnnnnnnnnnnnnnnnnnnnnnnnnnnnnnnnnnnnnnnnnnnnnnnnnnnnnnnnnnnnnnnnnnnnnnnnnnnnnnnnnnnnnnnnnnnnnnnnnnnnnnnnnnnnnnnnnnnnnnnnnnnnnnnnnnnnnnnnnnnnnnnnnnnnnnnnnnnnnnnnnnnnnnnnnnnnnnnnnnnnnnnnnnnnnnnnnnnnnnnnnnnnnnnnnnnnnnnnnnnnnnnnnnnnnnnnnnnnnnnnnnnnnnnnnnnnnnnnnnnnnnnnnnnnnnnnnnnnnnnnnnnnnnnnnnnnnnnnnnnnnnnnnnnnnnnnnnnnnnnnnnnnnnnnnnnnnnnnnnnnnnnnnnnnnnnnnnnnnnnnnnnnnnnnnnnnnnnnnnnnnnnnnnnnnnnnnnnnnnnnnnnnnnnnnnnnnnnnnnnnnnnnnnnnnnnnnnnnnnnnnnnnnnnnnnnnnnnnnnnnnnnnnnnnnnnnnnnnnnnnnnnnnnnnnnnnnnnnnnnnnnnnnnnnnnnnnnnnnnnnnnnnnnnnnnnnnnnnnnnnnnnnnnnnnnnnnnnnnnnnnnnnnnnnnnnnnnnnnnnnnnnnnnnnnnnnnnnnnnnnnnnnnnnnnnnnnnnnnnnnnnnnnnnnnnnnnnnnnnnnnnnnnnnnnnnnnnnnnnnnnnnnnnnnnnnnnnnnaccacgccgtcgtccgccagatgcacgtccaccggagagatcttcttgtagttcttcatgtactccttcgagtacgtcatgtgctgcgtcgcacctgagtcgaccagccacatgccgctcagcttggaggcacccgtgtcgccaccaaccgagaagaggaagtcgccagagtcatctttgacctgcgcgacgttcgctcgttgcggcctctgccgctccccgttctcgcggatccgcaccggacacttggcgatccaatgtccgtgctcgccgcagtagtgacaggcgctcgtcctctgcgcttgcgcctgccgtcccttgcgcttcccgttgtcgcttgtcatgaacgcttgaccttgagcgtgcgcggttccgtcagcaccgccaccttgttccttgcgcttcatgtcctcgtgcaggagccgagacgtcacgagctcccacgtcagcgtgtcggaacgcgattccaacgccgtgatgaggaactggtacgactcgctcagactggcaagaagcgtgattaccaagtcgtcctcgctgaccggagcgccgaccgcgtcgagctgttccgccagcgtcttgagcttgttaatgtgctccagcacatcatcaccttcgtccatcgttgtcgtgaagaaccgtcgacgaagaaagagcttgttcgccaggctcttcttctcgaagtgtccctcgagtcttgaccatgcatcatgcgcgtccttcgccgaccgcaccagcggcagctgcgagtcctccaacgcgagacagacgatcgccagcgccttgcgcgacttcttgcgaaacgtcgcttggtccgccgcggtcgtgcactgctcgagcttcacttccccactcgtcacttcccacagttcgcgctcctccagcaccatctgcatcttgaacttccatgtgtggaagttggttccgtcgaacttgttgatgcgggcggtcgcggtcggggcggcgtccatggcgaaggcgtagtcggggtcttggtcagggaagacggggcttgggctcataaccaaaaggaagagcacttgagcagtagttggcaaaatgcaaaaagtgattcgattcaggtccttagttcgcaaccgcgtgctacctctaagcctgctactggatacctcttactggatacaccctactggattctctactggatacacagttaccttatccaatcagagaacgccacgtcgatgcccatcttgtacccacaatcttggcgtaatcaccgtgacgtaatcatcgtcccgtaatcacctgaatgatttcggtaccacacagtgaaggtcacgccgacctcactgatgacgcgttcacgtcacacggtcgcttggcggggcgtcgtcacatcagtcttgacaacatttactaattgcacatgattaagctcgcacgtttgtggcattatcgatctatatttatacgatcattatatcttacagaagacgcctcactaatcaaaacaacatgaatacgcactgatctaaaattttcaccaaatgcaatgaaagattatatgcatgtacaatgccagccaaatgtttattgcaatccgcaagagcttgtattatctcacgatcaattgcgtccatatcacgtatcaatatccgatgacactggctgcttgggggatacgcctgaactttatcaagataacgacgatgcgtatagaataaccatgttaggcgagtaaaggttttgtatctaccttgttatcaatgaacagaagcagtcagacatagtatgaagcaatctttgttgctatggctttttcaggcatcaccgtctcgaagatggcttccacttcaatgcgcttgtggttgttcacttcagtctgaattttttccgaccccatccacagtttatcgctgtgttgattgatgaagctatatggaaggaaggtgtgacagaccgaaggatatgatcgttcatccattttgcccccacttgtcaaagcagtgtggaagcacttcgatgtgatcagtgataaattcaatcgagaggttctggtatgccaaaatggtttcccatacgagatcaccagggcggatgttttcacgaagaaactccactgaaagagattcaaaccggcagatcatttcttgatcattgtagctaagatcgctccattgagtaagctccgaagtctgcatgattgttgagttggtaaccgtaaactgatttgctttatatctcaaagccgcgcggattgctattttatgcttagaagtaatgtactatatcactaatataacaagccgttaacaatgagttttctagtattcgacactgaaaccactgggcttccggaaagcttcaatttgttagccactccgctgacattaaacaattgggattattgcagaatggtttaactagcttggcggatctatagcgtagataataaactattatcaagtaagtgttttctaataaaacccgagggatttacaaaaggaagaacacttgagcagtagttggcaaaatgcaaagtgattcgattcaggtccttagttcgcaaccgcgtgctacctctaagcctgctactggatacctcttactgggtacaccctactggattctctactggatacacagttaccttatccaatcagagaacgccacgtcgatgcccatcttgtacccacaatcatgtacccacaatcatggcgtaatcaccgtgacgtaatcatcgtcccgtaatcacctgaatgattgcggtacaacacagtgaaggtcacgccgacctcactgatgacgcgttcgcgtcacacggtcgcttggcgaggcgtcgtcacatcagtcttgacaacactcccactcgactcgtcagcgaccacgatgcccagcttcgtcctgagcgcgtcgaactgcggcgccgcgatcggcttcgtcatgatgtccgccagcatgtcgagtgtcgaaacatactgcaacaccacttgaccgtcttccaccttctcgcgcacgaagtggtagcgaatgtcgatgtgcttggtgcgcttgtggaactccgggttcttggccaacgcgatggagccttggttgtcctcgtagatcttcaccgcttcatcgctcgccatctcgcccagctcgcacagaaacaccttgagccacaccgcctcctgcgtggcctccgacagcgccatgtactcggcttccgtcgacgagagcgccaccgtgcgctgcttcttgcttcgccagctgatgcatccgccgttcatcatgaacgcgtagccgctcgtactccgtcgagactcgatgtcgccggcccagtccgcgtccgagttgccttgcagtccgtcctcgctgctcgcttgaaacacgaggccgtgcgtcttcgtgcctcggatgtagcggaagaccctcttgagcgcctgccagtgtgtcggacatgggtccgctgcgaactggctcagcactcccactgccgctgcgaggtccggacgagtccccaccatgagatacatgaggcagcccacggcgttccggtacggaacattcgccatggtctcgtcgtgcttgcagcctccctcgcacatggccttggtcagcttcagacccggatcctgcggtgtcttcacagggttgctctcatccatcttgaacttctcgagaatgtccttcgcgaacttggtctgccgcaccgacaccttcccagtcgccacatcttgctcgatctccataccgagaaagtacttgagctggcccatgtcggtcatctcgaaccggtcactcagcgcctgcttcgtgtccttcagcatcccgtcgctgctgctggcgaggaccagatcgtccacgtacagtgccacgaacatcatgtcatgattgtcccgcttcaagtagatgcagtggtcggactcgcacttcttgaaccccagtttcaacatgaactcgtcgatcgtcttgttccacatccgcggcgactgcttcaggccgtacagcgaacgcttgagccggcacacgtagtcgggtcgatctccgtccacatatccgtccggctgcgccatgtagatgtcctcgtccaacaagccgttgaggaacgcggtcttcacatccatctggtgcactgtgagcttgtacttggccgccagactcagcaacacccgaatcgacgtgaacttggccaccggcgcgaacgtctcgtcgtagtcgatgccgtacttctgcgagaaccccttcgccaccagtcgcgccttgaaccgctcgatctctccagactggttctccttcacgcggaacacccatctgcagccgatcgccttgcgtcccttcggcagtggcaccagggtccacgtctcgttcttgcggagcgactccacctccgagtcgcacgcctctttccacttgtctgcgtcgctggattccatcgccgacttgaacgttgtcggcatctctcccactgaatccacgacgtacgcagcctcgaagtcttccttctcttgtgctgcggcagacatctcgtccagcggttgctgtcgtcttggcaccgcataccgcttggcactcggaacctccacggcttcctcgagcgactgcgtgcgcgggtgtcgcttgctgccgggttcaaagtcttgattccgcgcagcttcttctctgttctcgtctgatccggactgagtctcttcatccgtggtgtcttcatcatcatctgtcggaagacccaccaacacctccttcgaagcgtagtcgcgtctcccaccgtcgaagacatcctccatgaactgcgcgtcgcggctcaccaacacgcgaccgctctcgatctcctcgaaccgatacgccttctcgtgctccgagtacccgaggaaacgacagcgcaccgaccgagcgtcgaacttcgaccgcttctccttcggcacgtgcacgtacgcgtggcacccgaacaccttgaggttggccagcaaaggcttcttgccggtccaaacgtggtgcggcgacttgtcgtgactgatggcgcgcgtcggacaccggttgcggaggaacgtggccgtcatcaccgcttctccccagtactccttcgacaacccggcgtgctccagcatgcagcgcgcacactccaccagcgtccgattcattcgctcggccactccgttgagctgaggcgtgtatggtggcgtgaacttctgctcgatgccgcgatccgcacacaacttggccatcgcacccgaagtgtactcgccgccgttgtcgctccgaagcaccttcactcgcttgccggtctgcgtctcagccaacgcgacgaacgcagcgaacttggcagccacctccgacttgttccgtagcaggtacaccacgcagaagtgcgacttgtcgtcgatgaacgtgacgaagtagcgcttgcctccgaacgtcgccgtctgcatcggaccgcacacatcgctgtggaccacctccagcacttgcttcgcacggttcggcgacgacttcatgaagcttactcgcgtttgcttgccgagtgcgcacccgtcgcacacctcccactgcttcaccgacgtcattgggatgccagtgccgtagcccttcttgacgatggcgtcgagaccaccatggccgatgtgaccaagtcgaaggtgccagaggtacgacgtggtgtccccttggcgattcttcgagcttgccgcattggcctcgtcagcaggcgtcctcggcgtcatgcagagcttgaacagtcctttgccttcgcgagcgccgagcttccacttgagacccttcgtttccgcgaagcacccgtcgctctcgaaggtcactggcccgacgtccttggtgaagcggccgacggagaacaggttgcgcgacagcttcgggatgtgccacacacccgtgagcacacccttcttcatgccgcgcggtgtctgcatcgacatcacgatgtcgccgctccccaccgcctgaaccacgccgtcgtccgccagatgcacgtccaccggagagatcttcttgtagttcttcatgtactccttcgagtacgtcatgtgctgcgtcgcacccgagtcgaccagccacatgccgctcagcttggaggcacccgtgtcgccaccaaccgagaagaggaagtcgccagagtcatcttcgacctgcgcgacgttcgctcgttgcggcctctgccgctccccgttctcgcggatccgcaccggacacttggcgatccaatgtccgtgctcgccgcagtagtgacaggcgctcgtcctctgcgcttgcgcctgccgtcccttgcgcttcccgttgtcgcttgtcatgaacgcttgaccttgagcgtgcgcggttccgtcagcaccaccaccttgttccttgcgcttcatgtcctcgtgcaggagccgagacgtcacgagctcccacgtcagcgtgtcggaacgcgattccaacgccgtgatgaggaactggtacgactcgctcagactggcaagaagcgtgatcaccaagtcgtcctcgctgaccggagcgccgaccgcgtcgagctgttccgccagcgtcttgagcttgttaatgtgctccagcacatcatcaccttcgtccatcgttgtcgtgaagaaccgtcgacgaagaaagagcttgttcgccaggctcttcttctcgaagtgtccctcgagtcttgaccatgcatcatgcgcatccttcgccgaccgcaccagcggcagctgcgagtcctccaacgcgagacagacgatcgccagcgccttgcgcgacttcttgcgaaacgtcgcttggtccgccgcggtcgtgcactgctcgagcttcacttccccactcgtcacttcccacagttcgcgctcctccagcaccatctgcatcttgaacttccatgtgtggaagttggttccgtcgaacttgttgatgcgggcggtcgcggtcggggcggcgtccatggcgaaggcgtagtcggggtcttggtcagggaagacggggcttgggctcataaccaaaaggaagagcacttgagcagtagttggcaaaatgcaaagtgattcgattcaggtccttagttcgcaaccgcgtgctacctctaagcctgctactggatacctcttactgggtacaccctgctggattctctactggatacacagttaccttatccaatcagagaacgccacgtcgatgcccatcttgtacccacaatcttggcgtaatcaccgtgacgtaatcatcgtcccgtaatcacctgaatgattgcggtacaacacagtgaaggtcacgccgacctcactgatgacgcgttcgcgtcacacggtcgcttggcgaggcgtcgtcacatcagtcttgacaacagtatctaccttgttatcaatgaacagaagcagtcagacatagtatgaagcaatctttgttgctatggctttttcaggcatcaccgtctcgaaaatggcttccacttcaatgcgcttgtggttgttcacttcagtctgaattttttccgaccccatccacagtttatcgctgtgttgattgatgaagctatatggaaggaaggtgtgacagaccgaaggatatgatcgttcatccattttgcccccacttgtcaaagcagtgtggaagcacttcgatgtgatcagtgataaattcaatcgagaggttctggtatgccaaaatggtttcccatacgagatcaccagggcggatgttttcacgaagaaactccactgaaagagatttaaaccggcagatcatttcttgatcattgtagccaagatcgctccattgagtaagctccgaagtctgcatgattgttgagttggtaaccgtaaactgatttgctttatatctcaaagccgcgcggattgctannnnnnnnnnnnnnnnnnnnnnnnnnnnnnnnnnnnnnnnnnnnnnnnnnnnnnnnnnnnnnnnnnnnnnnnnnnnnnnnnnnnnnnnnnnnnnnnnnnnnnnnnnnnnnnnnnnnnnnnnnnnnnnnnnnnnnnnnnnnnnnnnnnnnnnnnnnnnnnnnnnnnnnnnnnnnnnnnnnnnnnnnnnnnnnnnnnnnnnnnnnnnnnnnnnnnnnnnnnnnnnnnnnnnnnnnnnnnnnnnnnnnnnnnnnnnnnnnnnnnnnnnnnnnnnnnnnnnnnnnnnnnnnnnnnnnnnnnnnnnnnnnnnnnnnnnnnnnnnnnnnnnnnnnnnnnnnnnnnnnnnnnnnnnnnnnnnnnnnnnnnnnnnnnnnnnnnnnnnnnnnnnnnnnnnnnnnnnnnnnnnnnnnnnnnnnnnnnnnnnnnnnnnnnnnnnnnnnnnnnnnnnnnnnnnnnnnnnnnnnnnnnnnnnnnnnnnnnnnnnnnnnnnnnnnnnnnnnnnnnnnnnnnnnnnnnnnnnnnnnnnnnnnnnnnnnnnnnnnnnnnnnnnnnnnnnnnnnnnnnnnnnnnnnnnnnnnnnnnnnnnnnnnnnnnnnnnnnnnnnnnnnnnnnnnnnnnnnnnnnnnnnnnnnnnnnnnnnnnnnnnnnnnnnnnnnnnnnnnnnnnnnnnnnnnnnnnnnnnnnnnnnnnnnnnnnnnnnnnnnnnnnnnnnnnnnnnnnnnnnnnnnnnnnnnnnnnnnnnnnnnnnnnnnnnnnnnnnnnnnnnnnnnnnnnnnnnnnnnnnnnnnnnnnnnnnnnnnnnnnnnnnnnnnnnnnnnnnnnnnnnnnnnnnnnnnnnnnnnnnnnnnnnnnnnnnnnnnnnnnnnnnnnnnnnnnnnnnnnnnnnnnnnnnnnnnnnnnnnnnnnnnnnnnnnnnnnnnnnnnnnnnnnnnnnnnnnnnnnnnnnnnnnnnnnnnnnnnnnnnnnnnnnnnnnnnnnnnnnnnnnnnnnnnnnnnnnnnnnnnnnnnnnnnnnnnnnnnnnnnnnnnnnnnnnnnnnnnnnnnnnnnnnnnnnnnnnnnnnnnnnnnnnnnnnnnnnnnnnnnnnnnnnnnnnnnnnnnnnnnnnnnnnnnnnnnnnnnnnnnnnnnnnnnnnnnnnnnnnnnnnnnnnnnnnnnnnnnnnnnnnnnnnnnnnnnnnnnnnnnnnnnnnnnnnnnnnnnnnnnnnnnnnnnnnnnnnnnnnnnnnnnnnnnnnnnnnnnnnnnnnnnnnnnnnnnnnnnnnnnnnnnnnnnnnnnnnnnnnnnnnnnnnnnnnnnnnnnnnnnnnnnnnnnnnnnnnnnnnnnnnnnnnnnnnnnnnnnnacactcgacatgctggcggacatcatgacgaagccgatcgcggcgccgcagttcgacgcgctcaggacgaagctgggcatcgtggtcgctgacgagtcgagtgggagtgttgtcaagactgatgtgacgacgccccgccaagcgaccgtgtgacgcgaacgcgtcatcagtgaggtcggcgtgaccttcactgtgtggtaccgaaatcattcaggtgattacgggacgatgattacgtcacggtgattacgccatgattgtgggtacaggattgtgggtacaagatgggcatcgacgtggcgttctctgattggataaggtaactgtgtatccagtagagaatccagtagggtgtatccagtaagaggtatccagtagcaggcttagaggtagcacgcggttgcgaactaaggacctgaatcgaatcactttgcattttgccaactactgctcaagtgctcttccttttgtttacgccaccgatgattagacgagtaggatgattggatgaacaccggtgagtgatggttgattagatgcactaggtgataggacgcagggtcgcgtgtctataacagtagggtgtaagctccaacaattcaatcactttcgaatcttcattctacccctcaagtgccttcgctccggtcccgccgtctgcgacgtccctccctccgcttcgtccgagcttcgtgtccaagatccataccttccatcaggaaatgcagcgatgtgtttgttataattaagagtcttcgtattgtgtcgcgttcgatgcagattgatataatgagtggcatttactaattgcacatgattaagctcgcacgtttgtggcattatcgatctatatttatacgatcattatatcttacagaagacgcctcactaatcaaaacaacatgaatacgcactgatctaaaattttcaccaaatgcaatgaaagattatatgcatgtacaatgccagccaaatgtttattgcaatccgcaagagcttgtattatctcacgatcaattgcgtccatatcacgtatcaatatccgatgacactggctgcttgggggatacgcctgaactttatcaagataacgacgatgcgtatagaataaccatgttaggcgagtaaaggttttgtatcaaaaggaagagcacttgagcagtagttggcaaaatgcaaagtgattcgattcaggtccttagttcgcaaccgcgtgctacctctaagcctgctactggatacctcttactgggtacaccctgctggattctctactggatacacagttaccttatccaatcagagaacgccacgtcgatgcccatcttgtacccacaatcttggcgtaatcaccgtgacgtaatcatcgtcccgtaatcacctgaatgattgcggtacaacacagtgaaggtcacgccgacctcactgatgacgcgttcgcgtcacacggtcgcttggcgaggcgtcgtcacatcagtcttgacaacactccccctcgactcgtcagcgaccacgatgcccagcttcgtcctgagcgcgtcgaactgccacagttaccttatccaatcagagaacgccacgtcgatgcccatcttgtacccacaatcctgtacccacaatcatggcgtaatcaccgtgacgtaatcatcgtcccgtaatcacctgaatgattgcggtacaacacagtgaaggtcacgccaacctcactgatgacgcgttcgcgtcacacggtcgcttggcggggcgtcgtcacatcagtcttgacaacacacttcgatgtgatcagtgataaattcaatcgagaggttctggtatgccaaaatggtttcccatacgagatcaccagggcggatgttttcacgaagaaactccactgaaagagatttaaaccggcagatcatttcttgatcattgtagccaagatcgctccattgagtaagctccgaagtctgcatgattgttgagttggtaaccgtaaactgatttgctttatatctcaaagccgcgcggattgctattttatgcttagaagtaatgtactatatcactaatataacaagcagttaacaatgagttttctagtattcgacactgaaaccactgggcttccggaaagcttcaatttgttagtcactccgctgacattaaacaattgggattattgtagaatggttttactagcttggcggatctatagcgtagataataaactattatcaagtaagtgttttctaataaaacccgagggatttaccattccactgttatctgcaatgattcataagattactacagaagaagcattggaaaagagtcacccgcttggcgatgtattagactttcttttcattgatatcaatgtccatgaagttgtggtgtagcgggatcggccagagacgcagcgatcgccggccaagcagtatccggtcgatcgaggacttgcacacgagagaaagatcactagagtaggtccagctgaccaatgtattaatccagtcttaaccgtaccgctagttcactactcgaagtgtcaacgcttgccgaggccaatgtagctcctgggacttgacgacttgagggcacttgtggtcttctgtgcaaattgcgttctgatttatgtttagctggtctctctctaccgctgccatctcatctaccatcctacaaccaaacgattactggattcttgctctggcttcgcccccatgtgcttcccatccgggtcgatcggcgatccacgatcggctcccgatccacgatcgaccccaatcggcgatccacgatcggctcccgatccacgatcgcctcctgatccacgatcgatcccgatcggcgatcaactcccgatcgatgacctgtgcgagttgccgtgcgctgccgatccgtcctcttctgtcctcggccgccctagatctgcgagattggtcgtcgatccgggcttgggtctacgtcgaatcacgccgcagtccaagcgcgatcgcccgtaatctgtcttgacatatgtgttgccttacgcgtcgacgttatccaatcgcttgagatctctcgatagaccctcttgatccgcgaccgcagcctgatccctgcctatcgttctgtcaccatgtcgcttgatgtcatcgcagttggaaattctcgttcggtgcttcaccacaaagtaaatagcatcgtggctcataacattaagtttgatgataatgtgattttatctgaattatatcgcagtggcaatgatgatgtagtttgtctgtggaagtaagacttctttcgactggtgcgaaactccaacgtagcatatgtcatatgaggcattagagagaccgtttttttgcaaccggagcgtagcggaggtctgcaatggtcggcgcgtaggccggagtagttgcactgcgaagtagttactatctttttaccgacgccttgcccgccatgagcgaagcgaagcgtagcagaattggcggtgcaaacgaggagctcacctgttctcggttaaatacgaaatgaggtcaacggatgaaggagagacggctgtcatcacctgttccttctgtcactacaaatggtttaattaagtttgtttcggacaaggcaatcacattcaaagaactattttttaattactagatatccaatcgaatcattttttgtggctgagatgtgtctcgtttaaccagacgagggcgccttttgggtggcttggaattgcgacgcgcagctcgatccagccaagtcattgcggcagagttgtttctcttggtcgcgcacgtagccataagtttgtgaaaatacttgtcgtccacgaatgagtatgtccagcgcagaaagtcaatcgaactcgattgacacgaccgcacagccagtatggtctttataggtttcatgtaggtgttattgagggttgctggtcttgggtactgtgtaccagttgtacccattaaccggttaacccgaaccggtccaatccgaacccacgttgattatggtgattacggtaagttgtttacgccaccgatgattagacgagtaggatgattggatgaacaccggtgagtgatggttgattagatgcactaggtgataggacgcagggtcgcgtgtctataacagtagggtgtaagctccaacaattcaatcactttcgaatcttcattctacccctcaagtgccttcgctccggtcccgccgtctgcgacgtccctccctccgcttcgtccgagcttcgtgtccaagatccataccttccatcaggaaatgcagcgatgtgtttgttataattaagagtcttcgtattgtgtcgcgttcgatgcagattgatataatgagtggcatttactaattgcacatgattaagctcgcacgtttgtggcattatcgatctatatttatacgatcattatatcttacagaagacgcctcactaatcaaaacaacatgaatacgcactgatctaaaattttcaccaaatgcaatgaaagattatatgcatgtacaatgccagccaaatgtttattgcaatccgcaagagcttgtattatctcacgatcaattgcgtccatatcacgtatcaatatccgatgacactggctgcttgggggatacgcctgaactttatcaagataacgacgatgcgtatagaataaccatgttaggcgagtaaaggttttgtatctaccttgttatcaatgaacagaagcagtcagacatagtatgaagcaatctttgttgctatggctttttcaggcatcaccgtctcgaagatggcttccacttcaatgcgcttgtggttgttcacttcagtctgaattttttccgaccccatccacagtttatcgctgtgttgattgatgaagctatatggaaggaaggtgtgacagaccgaaggatatgatcgttcatccattttgcccccacttgtcaaagcagtgtggaagcacttcgatgtgatcagtgataaattcaatcgagaggttctggtatgccaaaatggtttcccatacgagatcaccagggcggatgttttcacgaagaaactccactgaaagagatttaaaccggcagatcatttcttgatcattgtagccaagatcgctccattgagtaagctccgaagtctgcatgattgttgagttggtaaccgtaaactgatttgctttatatctcaaagccgcgcggattgctattttatgcttagaagtaatgtactatatcactaatataacaagcagttaacaatgagttttctagtattcgacactgaaaccactgggcttccggaaagcttcaatttgttagtcactccgctgacattaaacaattgggattattgtagaatggttttactagcttggcggatctatagcgtagataataaactattatcaagtaagtgttttctaataaaacccgagggatttaccattccactgttatctgcaatgattcataagattactacagaagaagcattggaaaagagtcacccgcttggcgatgtattagactttcttttcattgatatcaatgtccatgaagttgtggtgtagcgggatcggccagagacgcagcgatcgccggccaagcagtatccggtcgatcgaggacttgcacacgagagaaagatcactagagtaggtccagctgaccaatgtattaatccagtcttaaccgtaccgctagttcactactcgaagtgtcaacgcttgccgaggccaatgtagctcctgggacttgacgacttgagggcacttgtggtcttctgtgcaaattgcgttctgatttatgtttagctggtctctctctaccgctgccatctcatctaccatcctacaaccaaacgattactggattcttgctctggcttcgcccccatgtgcttcccatccgggtcgatcggcgatccacgatcggctcccgatccacgatcgaccccaatcggcgatccacgatcggctcccgatccacgatcgcctcctgatccacgatcggcgatcaactcccgatcgatgacctgtgcgagttgccgtgcgctgccgatccgtcctcttctgtcctcggccgccctagatctgcgagattggtcgtcgatccgggcttgggtctacgtcgaatcacgccgcagtccaagcgcgatcgcccgtaatctgtcttgacatatgtgttgccttacgcgtcgacgttatccaatcgcttgagatctctcgatagaccctcttgatccgcgaccgcagcctgatccctgcctatcgttctgtcaccatgtcgcttgatgtcatcgcagttggaaattctcgttcggtgcttcaccacaaagtaaatagcatcgtggctcataacattaagtttgatgataatgtgattttatctgaattatatcgcagtggcaatgatgatgtagtttgtctgtggaagtaagacttctttcgactggtgcgaaactccaacgtagcatatgtcatatgaggcattagagagaccgtttttttgcaaccggagcgtagcggaggtctgcaatggtcggcgcgtaggccggagtagttgcactgcgaagtagttactatctttttaccgacgccttgcccgccatgagcgaagcgaagcgtagcagaattggcggtgcaaacgaggagctcacctgttctcggttaaatacgaaatgaggtcaacggatgaaggagagacggctgtcatcacctgttccttctgtcactacaaatggtttaattaagtttgtttcggacaaggcaatcacattcaaagaactattttttaattactagatatccaatcgaatcattttttgtggctgagatgtgtctcgtttaaccagacgagggcgccttttgggtggcttggaattgcgacgcgcagctcgatccagccaagtcattgcggcagagttgtttctcttggtcgcgcacgtagccataagtttgtgaaaatacttgtcgtccacgaatgagtatgtccagcgcagaaagtcaatcgaactcgattgacacgaccgcacagccagtatggtctttataggtttcatgtaggtgttattgagggttgctggtcttgggtactgtgtaccagttgtacccattaaccggttaacccgaaccggtccaatccgaacccacgttgattatggtgattacggtaagttgtttacgccaccgatgattagacgagtaggatgattggatgaacaccggtgagtgatggttgattagatgcactaggtgataggacgcagggtcgcgtgtctataacagtagggtgtaagctccaacaattcaatcactttcgaatcttcattctacccctcaagtgccttcgctccggtcccgccgtctgcgacgtccctccctccgcttcgtccgagcttcgtgtccaagatccataccttccatcaggaaatgcagcgatgtgtttgttataattaagagtcttcgtattgtgtcgcgttcgatgcagattgatataatgagtggcatttactaattgcacatgattaagctcgcacgtttgtggcattatcgatctatatttatacgatcattatatcttacagaagacgcctcactaatcaaaacaacatgaatacgcactgatctaaaattttcaccaaatgcaatgaaagattatatgcatgtacaatgccagccaaatgtttattgcaatccgcaagagcttgtattatctcacgatcaattgcgtccatatcacgtatcaatatccgatgacactggctgcttgggggatacgcctgaactttatcaagataacgacgatgcgtatagaataaccatgttaggcgagtaaaggttttgtatctaccttgttatcaatgaacagaagcagtcagacatagtatgaagcaatctttgttgctatggctttttcaggcatcaccgtctcgaaaatggcttccacttcaatgcgcttgtggttgttcacttcagtctgaattttttccgaccccatccacagtttatcgctgtgttgattgatgaagctatatggaaggaaggtgtgacagaccgaaggatatgatcgttcatccattttgcccccacttgtcaaagcagtgtggaagcacttcgatgtgatcagtgataaattcaatcgagaggttctggtatgccaaaatggtttcccatacgagatcaccagggcggatgttttcacgaagaaactccactgaaagagatttaaaccggcagatcatttcttgatcattgtagccaagatcgctccattgagtaagctccgaagtctgcatgattgttgagttggtaaccgtaaactgatttgctttatatctcaaagccgcgcggattgctattttatgcttagaagtaatgtactatatcactaatataacaagcagttaacaatgagttttctagtattcgacactgaaaccactgggcttccggaaagcttcaatttgttagtcactccgctgacattaaacaattgggattattgtagaatggtttaactagcttggcggatctatagcgtagataataaactattatcaagtaagtgttttctaataaaacccgagggatttaccattccactgttatctgcaatgattcataagattactacagaagaagcattggaaaagagtcacccgcttggcgatgtattagactttcttttcattgatatcaatgtccatgaagttgtggtgtagcgggatcggccagagacgcagcgatcgccggccaagcagtatccggtcgatcgaggacttgcacacgagagaaagatcactagagtaggtccagctgaccaatgtattaatccagtcttaaccgtaccgctagttcactactcgaagtgtcaacgcttgccgaggccaatgtagctcctgggacttgacgacttgagggcacttgtggtcttctgtgcaaattgcgttctgatttatgtttagctggtctctctctaccgctgcaatctcatctaccatcctacaaccaaacgattactggattcttgctctggcttcgcccccatgtgcttcccatccgggtcgatcggcgatccacgatcggctcccgatccacgattgaccccaatcggcgatccacgatcggctcccgatccacgatcgcctcctgatccacgatcgatcccgatcggcgatcaactcccgatcgatgacctgtgcgagttgccgtgcgctgccgatccgtcctcttctgtcctcggccgccctagatctgcgagattggtcgtcgatccgggcttgggtctacgtcgaatcacgccgcagtccaagcgcgatcgcccgtaatctgtcttgacatatgtgttgccttacgcgtcgacgttatccaatcgcttgagatctctcgatagaccctcttgatccgcgaccgcagcctgatccctgcctatcgttctgtcaccatgtcgcttgatgtcatcgcagttggaaattctcgttcggtgcttcaccacaaagtaaatagcatcgtggctcataacattaagtttgatgataatgtgattttatctgaattatatcgcagtggcaatgatgatgtagtttgtctgtggaagtaagacttctttcgactggtgcgaaactccaacgtagcatatgtcatatgaggcattagagagaccgtttttttgcaaccggagcgtagcggaggtctgcaatggtcggcgcgtaggccggagtagttgcactgcgaagtagttactatctttttaccgacgccttgcccgccatgagcgaagcgaagcgtagcagaattggcggtgcaaacgaggagctcacctgttctcggttaaatacgaaatgaggtcaacggatgaaggagagacggctgtcatcacctgttccttctgtcactacaaatggtttaattaagtttgtttcggacaaggcaatcacattcaaagaactattttttaattactagatatccaatcgaatcattttttgtggctgagatgtgtctcgtttaaccagacgagggcgccttttgggtggcttggaattgcgacgcgcagctcgatccagccaagtcattgcggcagagttgtttctcttggtcgcgcacgtagccataagtttgtgaaaatacttgtcgtccacgaatgagtatgtccagcgcagaaagtcaatcgaactcgattgacacgaccgcacagccagtatggtctttataggtttcatgtaggtgttattgagggttgctggtcttgggtactgtgtaccagttgtacccattaaccggttaacccgaaccggtccaatccgaacccacgttgattatggtgattacggtaagttgtttacgccaccgatgattagacgagtaggatgattggatgaacaccggtgagtgatggttgattagatgcactaggtgataggacgcagggtcgcgtgtctataacagtagggtgtaagctccaacaattcaatcactttcgaatcttcattctacccctcaagtgccttcgctccggtcccgccgtctgcgacgtccctccctccgcttcgtccgagcttcgtgtccaagatccataccttccatcaggaaatgcagcgatgtgtttgttataattaagagtcttcgtattgtgtcgcgttcgatgcagattgatataatgagtggcatttactaattgcacatgattaagctcgcacgtttgtggcattatcgatctatatttatacgatcattatatcttacagaagacgcctcactaatcaaaacaacatgaatacgcactgatctaaaattttcaccaaatgcaatgaaagattatatgcatgtacaatgccagccaaatgtttattgcaatccgcaagagcttgtattatctcacgatcaattgcgtccatatcacgtatcaatatccgatgacactggctgcttgggggatacgcctgaactttatcaagataacgacgatgcgtatagaataaccatgttaggcgagtaaaggttttgtatctaccttgttatcaatgaacagaagcagtcagacatagtatgaagcaatctttgttgctatggctttttcaggcatcaccgtctcgaagatggcttccacttcaatgcgcttgtggttgttcacttcagtctgaattttttccgaccccatccacagtttatcgctgtgttgattgatgaagctatatggaaggaaggtgtgacagaccgaaggatatgatcgttcatccattttgcccccacttgtcaaagcagtgtggaagcacttcgatgtgatcagtgataaattcaatcgagaggttctggtatgccaaaatggtttcccatacgagatcaccagggcggatgttttcacgaagaaactccactgaaagagatttaaatcggcagatcatttcttgatcattgtagccaagatcgctccattgagtaagctccgaagtctgcatgattgttgagttggtaaccgtaaactgatttgctttatatctcaaagccgcgcggattgctattttatccttagaagtaatgtactatatcactaatataacaagcagttaacaatgagttttctagtattcgacactgaaaccactgggcttccggaaagcttcaatttgttagtcactccgctgacattaaacaattgggattattgtagaatggttttactagcttggcggatctatagcgtagataataaactattatcaagtaagtgttttctaataaaacccgagggatttaccattccactgttatctgcaatgattcataagattactacagaagaagcattggaaaagagtcacccgcttggcgatgtattagactttcttttcattgatatcaatgtccatgaagttgtggtgtagcgggatcggccagagacgcagcgatcgccggccaagcagtatccggtcgatcgaggacttgcacacgagagaaagatcactagagtaggtccagctgaccaatgtattaatccagtcttaaccgtaccgctagttcactactcgaagtgtcaacgcttgccgaggccaatgtagctcctgggacttgacgacttgagggcacttgtggtcttctgtgcaaattgcgttctgatttatgtttagctggtctctctctaccgctgccatctcatctaccatcctacaaccaaacgattactggattcttgctctggcttcgcccccatgtgcttcccatccgggtcgatcggctcccgatccacgatcgcctcctgatccacgatcgatcccgatcggcgatcaactcccgatcgatgacctgtgcgagttgccgtgcgctgccgatccgtcctcttctgtcctcggccgccctagatctgcgagattggtcgtcgatccgggcttgggtctacgtcgaatcacgccgcagtccaagcgcgatcgcccgtaatctgtcttgacatatgtgttgccttacgcgtcgacgttatccaatcgcttgagatctctcgatagaccctcttgatccgcgactgcagcctgatccctgcctatcgttctgtcaccatgtcgcttgatgtcatcgcagttggaaattctcgttcggtgcttcaccacaaagtaaatagcatcgtggctcataacattaagtttgatgataatgtgattttatctgaattatatcgcagtggcaatgatgatgtagtttgtctgtggaagtaagacttctttcgactggtgcgaaactccaacgtagcatatgtcatatgaggcattagagagaccgtttgcaaccggagcgtagcggaggtctgcaatggtcggcgcgtaggccggagtagttgcactgcgaagtagttactatctttttaccgacgccttgcccgccatgagcgaagcgaagcatagcagaattggcggtgcaaacgaggagctcacctgttctcggttaaatacgaaatgaggtcaacggatgaaggagagacagctgtcatcacctgttccttctgtcactacaaatggtttaattaagtttgtttcggacaaggcaatcacattcaaagaactattttttaattactagatatccaatcgaatcattttttgtggctgagatgtgtctcgtttaaccagacgagggcgccttttgggtggcttggaattgcgacgcgcagctcgatccagccaagtcattgcggcagagttgtttctcttggtcgcgcacgttgctgatggaaggtatggatcttnnnnnnnnnnnnnnnnnnnnnnnnnnnnnnnnnnnnnnnnnnnnnnnnnnnnnnnnnnnnnnnnnnnnnnnnnnnnnnnnnnnnnnnnnnnnnnnnnnnntgccccaatttcccgcagtacgtacactggcgagactctcggtcggtgttgaacgccttggccgcattctccgtcttcaccgtcgccgtcttctcgccttgtctcttgatgtgctcattcgtcagcaccttcacgacgtcttgcgatcgtagttcagcgctgctcatctccaagttcagcacgacgttctcgtagctcttggggaggctgcgcaacacacgtcctcatcctccatcttggcgccgatgctgctgagcttggcgctgatgttgaggacctcgttgcaatgatgcaagacgttgccgccttccgacatctccatgctgaagagttggcgcttcaggtagatgcgtccagccttctgcgaaccaccgtacagcgtcttcaggcgcgtccacgcaacccacgcttcctcgcagtcgtcgaccacatggtggtagtccgcgtccatgtggagcaacatcagtccgaacgcgatgttgctcgacttgacgtagtcgtccttggcccgcgagtccgtgaagctcggcgtcgtctcgcggttcacgacatgccacgtcgacttggtcaggaacacgccacgcatgtagcggttccacgtcgcgtagttgtccccgttgaacttgtcaatggagaccttggtcgaggcgtcttgggcagaggacatggtgcttgggctcataacctgatggaaggtatggatcttggacacgaagctcggacgaagcggagggagggacgttgcagacggcgggaccggagcgaaggcacttgagggatagaatgaagattcgaaagtgattgaattgttggagcttacaccctactgttatagacacgcgaccctgcgtcctatcacctagtgcatctaatcaaccatcactcaccggtgttcatccaatcatcctactcgtctaatcatcggtggcgtaaacaacttaccgtaatcaccataatcaacgtgggttcggattggaccggttcgggttaaccggttaatgggtacaactggtacacagtacccaagaccagcaaccctcaatacaggcacgccagaggtgacacgtgtacgttcatatggaagaaaccgcggcggtagcacattggctttgtaaccaccaactatgttgcccggagggttgaagttcattacgacaacagctattctgggatctggatcgtatgcatatccaatcccatactgagtagtatcgcgccaacaaagttgcgtaaaatgttttgtatttggggaagggccatcggaactgaaatcatacttgtagacttctgaataccaggcatcgattgttttctttatgattttacatggttcgttttggtatcctttaaggaatcctaaattctcaccgtacagaggggtttccagaatgtttgaagtcttttgtcctaatcaaaggtggctgcatagttctgtggaaatgcagcgatgtgtttgttataattaagagtcttcgtattgtgtcgcgttcgatgcagattgatataatgagtggcatttactaattgcacatgattaagctcgcacgtttgtggcattatcgatctatatttatacgatcattatatcttacaaaagacgcctcactaatcaaaacaacatgaatacgcactgatctaaaattttcaccaaatgcaatgaaagattatatgcatgtacaatgccagccaaatgtttattgcaatccgcaagagcttgtattatctcacgatcaattgcttccatatcgcgtatcaatatccgatgatactggctgcttgggggatacgcctgaactttatcaagataacgacgatgcgtatagaataaccatgttaggcgagtaaaggttttgtatctaccttgttatcaatgaacagaagcagtcagacatagtatgaagcaatctttgttgctatggctttttcaggcatcaccgtctcgaaaatggcttccacttcaatgcgcttgtggttgttcacttcagtctgaattttttccgaccccatccacagtttatcgctgtgttgattgatgaagctatatggaaggaaggtgtgacagaccgaaggatatgatcgttcatccattttgcccccacttgtcaaagcagtgtggaagcacttcgatgtgatcagtgataaattcaatcgagaggttctggtatgccaaaatggtttcccatacgagatcaccagggcggatgttttcacgaagaaactccactgaaagagatttaaaccggcagatcatttcttgatcattgtagctaagatcgctccattgagtaagctccgaagtctgcatgattgttgagttggtaaccgtaaactgatttgctttatatctcaaagccgcgcggattgctattttatgcttagaagtaatgtactatatcactaatataacaagcagttaacaatgagttttctagtattcgacactgaaaccactgggcttccggaaagcttcaatttgttagccactccgctgacattaaacaattgggattattgcagaatggtttaactagcttggcggatctatagcgtagataataaactattatcaagtaagtgttttctaataaaacccgagggatttaccattccactgtcatctgcaatgattcataagattactacagaagaagcattggaaaagagtcacccgcttggcgatgtattagactttcttttcattgatatcaatgtccatgaagttgtggtgtagcgggatcggccaaaatctggttaaggcctgatcgagcttcccaccagcgcccagacaccgactaacggagggggccccccaacgatccgtgatcggctgaacttgttctcaccttgtgtacccgtcggcgggctggatctgctctctcggggctccgaagatnnnnnnnnnnnnnnnnnnnnnnnnnnnnnnnnnnnnnnnnnnnnnnnnnnnnnnnnnnnnnnnnnnnnnnnnnnnnnnnnnnnnnnnnnnnnnnnnnnnnnnnnnnnnnnnnnnnnnnnnnnnnnnnnnnnnnnnnnnnnnnnnnnnnnnnnnnnnnnnnnnnnnnnnnnnnnnnnnnnnnnnnnnnnnnnnnnnnnnnnnnnnnnnnnnnnnnnnnnnnnnnnnnnnnnnnnnnnnnnnnnnnnnnnnnnnnnnnnnnnnnnnnnnnnnnnnnnnnnnnnnnnnnnnnnnnnnnnnnnnnnnnnnnnnnnnnnnnnnnnnnnnnnnnnnnnnnnnnnnnnnnnnnnnnnnnnnnnnnnnnnnnnnnnnnnnnnnnnnnnnnnnnnnnnnnnnnnnnnnnnnnnnnnnnnnnnnnnnnnnnnnnnnnnnnnnnnnnnnnnnnnnnnnnnnnnnnnnnnnnnnnnnnnnnnnnnnnnnnnnnnnnnnnnnnnnnnnnnnnnnnnnnnnnnnnnnnnnnnnnnnnnnnnnnnnnnnnnnnnnnnnnnnnnnnnnnnnnnnnnnnnnnnnnnnnnnnnnnnnnnnnnnnnnnnnnnnnnnnnnnnnnnnnnnnnnnnnnnnnnnnnnnnnnnnnnnnnnnnnnnnnnnnnnnnnnnnnnnnnnnnnnnnnnnnnnnnnnnnnnnnnnnnnnnnnnnnnnnnnnnnnnnnnnnnnnnnnnnnnnnnnnnnnnnnnnnnnnnnnnnnnnnnnnnnnnnnnnnnnnnnnnnnnnnnnnnnnnnnnnnnnnnnnnnnnnnnnnnnnnnnnnnnnnnnnnnnnnnnnnnnnnnnnnnnnnnnnnnnnnnnnnnnnnnnnnnnnnnnnnnnnnnnnnnnnnnnnnnnnnnnnnnnnnnnnnnnnnnnnnnnnnnnnnnnnnnnnnnnnnnnnnnnnnnnnnnnnnnnnnnnnnnnnnnnnnnnnnnnnnnnnnnnnnnnnnnnnnnnnnnnnnnnnnnnnnnnnnnnnnnnnnnnnnnnnnnnnnnnnnnnnnnnnnnnnnnnnnnnnnnnnnnnnnnnnnnnnnnnnnnnnnnnnnnnnnnnnnnnnnnnnnnnnnnnnnnnnnnnnnnnnnnnnnnnnnnnnnnnnnnnnnnnnnnnnnnnnnnnnnnnnnnnnnnnnnnnnnnnnnnnnnnnnnnnnnnnnnnnnnnnnnnnnnnnnnnnnnnnnnnnnnnnnnnnnnnnnnnnnnnnnnnnnnnnnnnnnnnnnnnnnnnnnnnnnnnnnnnnnnnnnnnnnnnnnnnnnnnnnnnnnnnnnnnnnnnnnnnnnnnnnnnnnnnnnnnnnnnnnnnnnnnnnnnnnnnnnnnnnnnnnnnnnnnnnnnnnnnnnnnnnnnnnnnnnnnnnnnnnnnnnnnnnnnnnnnnnnnnnnnnnnnnnnnnnnnnnnnnnnnnnnnnnnnnnnnnnnnnnnnnnnnnnnnnnnnnnnnnnnnnnnnnnnnnnnnnnnnnnnnnnnnnnnnnnnnnnnnnnnnnnnnnnnnnnnnnnnnnnnnnnnnnnnnnnnnnnnnnnnnnnnnnnnnnnnnnnnnnnnnnnnnnnnnnnnnnnnnnnnnnnnnnnnnnnnnnnnnnnnnnnnnnnnnnnnnnnnnnnnnnnnnnnnnnnnnnnnnnnnnnnnnnnnnnnnnnnnnnnnnnnnnnnnnnnnnnnnnnnnnnnnnnnnnnnnnnnnnnnnnnnnnnnnnnnnnnnnnnnnnnnnnnnnnnnnnnnnnnnnnnnnnnnnnnnnnnnnnnnnnnnnnnnnnnnnnnnnnnnnnnnnnnnnnnnnnnnnnnnnnnnnnnnnnnnnnnnnnnnnnnnnnnnnnnnnnnnnnnnnnnnnnnnnnnnnnnnnnnnnnnnnnnnnnnnnnnnnnnnnnnnnnnnnnnnnnnnnnnnnnnnnnnnnnnnnnnnnnnnnnnnnnnnnnnnnnnnnnnnnnnnnnnnnnnnnnnnnnnnnnnnnnnnnnnnnnnnnnnnnnnnnnnnnnnnnnnnnnnnnnnnnnnnnnnnnnnnnnnnnnnnnnnnnnnnnnnnnnnnnnnnnnnnnnnnnnnnnnnnnnnnnnnnnnnnnnnnnnnnnnnnnnnnnnnnnnnnnnnnnnnnnnnnnnnnnnnnnnnnnnnnnnnnnnnnnnnnnnnnnnnnnnnnnnnnnnnnnnnnnnnnnnnnnnnnnnnnnnnnnnnnnnnnnnnnnnnnnnnnnnnnnnnnnnnnnnnnnnnnnnnnnnnnnnnnnnnnnnnnnnnnnnnnnnnnnnnnnnnnnnnnnnnnnnnnnnnnnnnnnnnnnnnnnnnnnnnnnnnnnnnnnnnnnnnnnnnnnnnnnnnnnnnnnnnnnnnnnnnnnnnnnnnnnnnnnnnnnnnnnnnnnnnnnnnnnnnnnnnnnnnnnnnnnnnnnnnnnnnnnnnnnnnnnnnnnnnnnnnnnnnnnnnnnnnnnnnnnnnnnnnnnnnnnnnnnnnnnnnnnnnnnnnnnnnnnnnnnnnnnnnnnnnnnnnnnnnnnnnnnnnnnnnnnnnnnnnnnnnnnnnnnnnnnnnnnnnnnnnnnnnnnnnnnnnnnnnnnnnnnnnnnnnnnnnnnnnnnnnnnnnnnnnnnnnnnnnnnnnnnnnnnnnnnnnnnnnnnnnnnnnnnnnnnnnnnnnnnnnnnnnnnnnnnnnnnnnnnnnnnnnnnnnnnnnnnnnnnnnnnnnnnnnnnnnnnnnnnnnnnnnnnnnnnnnnnnnnnnnnnnnnnnnnnnnnnnnnnnnnnnnnnnnnnnnnnnnnnnnnnnnnnnnnnnnnnnnnnnnnnnnnnnnnnnnnnnnnnnnnnnnnnnnnnnnnnnnnnnnnnnnnnnnnnnnnnnnnnnnnnnnnnnnnnnnnnnnnnnnnnnnnnnnnnnnnnnnnnnnnnnnnnnnnnnnnnnnnnnnnnnnnnnnnnnnnnnnnnnnnnnnnnnnnnnnnnnnnnnnnnnnnnnnnnnnnnnnnnnnnnnnnnnnnnnnnnnnnnnnnnnnnnnnnnnnnnnnnnnnnnnnnnnnnnnnnnnnnnnnnnnnnnnnnnnnnnnnnnnnnnnnnnnnnnnnnnnnnnnnnnnnnnnnnnnnnnnnnnnnnnnnnnnnnnnnnnnnnnnnnnnnnnnnnnnnnnnnnnnnnnnnnnnnnnnnnnnnnnnnnnnnnnnnnnnnnnnnnnnnnnnnnnnnnnnnnnnnnnnnnnnnnnnnnnnnnnnnnnnnnnnnnnnnnnnnnnnnnnnnnnnnnnnnnnnnnnnnnnnnnnnnnnnnnnnnnnnnnnnnnnnnnnnnnnnnnnnnnnnnnnnnnnnnnnnnnnnnnnnnnnnnnnnnnnnnnnnnnnnnnnnnnnnnnnnnnnnnnnnnnnnnnnnnnnnnnnnnnnnnnnnnnnnnnnnnnnnnnnnnnnnnnnnnnnnnnnnnnnnnnnnnnnnnnnnnnnnnnnnnnnnnnnnnnnnnnnnnnnnnnnnnnnnnnnnnnnnnnnnnnnnnnnnnnnnnnnnnnnnnnnnnnnnnnnnnnnnnnnnnnnnnnnnnnnnnnnnnnnnnnnnnnnnnnnnnnnnnnnnnnnnnnnnnnnnnnnnnnnnnnnnnnnnnnnnnnnnnnnnnnnnnnnnnnnnnnnnnnnnnnnnnnnnnnnnnnnnnnnnnnnnnnnnnnnnnnnnnnnnnnnnnnnnnnnnnnnnnnnnnnnnnnnnnnnnnnnnnnnnnnnnnnnnnnnnnnnnnnnnnnnnnnnnnnnnnnnnnnnnnnnnnnnnnnnnnnnnnnnnnnnnnnnnnnnnnnnnnnnnnnnnnnnnnnnnnnnnnnnnnnnnnnnnnnnnnnnnnnnnnnnnnnnnnnnnnnnnnnnnnnnnnnnnnnnnnnnnnnnnnnnnnnnnnnnnnnnnnnnnnnnnnnnnnnnnnnnnnnnnnnnnnnnnnnnnnnnnnnnnnnnnnnnnnnnnnnnnnnnnnnnnnnnnnnnnnnnnnnnnnnnnnnnnnnnnnnnnnnnnnnnnnnnnnnnnnnnnnnnnnnnnnnnnnnnnnnnnnnnnnnnnnnnnnnnnnnnnnnnnnnnnnnnnnnnnnnnnnnnnnnnnnnnnnnnnnnnnnnnnnnnnnnnnnnnnnnnnnnnnnnnnnnnnnnnnnnnnnnnnnnnnnnnnnnnnnnnnnnnnnnnnnnnnnnnnnnnnnnnnnnnnnnnnnnnnnnnnnnnnnnnnnnnnnnnnnnnnnnnnnnnnnnnnnnnnnnnnnnnnnnnnnnnnnnnnnnnnnnnnnnnnnnnnnnnnnnnnnnnnnnnnnnnnnnnnnnnnnnnnnnnnnnnnnnnnnnnnnnnnnnnnnnnnnnnnnnnnnnnnnnnnnnnnnnnnnnnnnnnnnnnnnnnnnnnnnnnnnnnnnnnnnnnnnnnnnnnnnnnnnnnnnnnnnnnnnnnnnnnnnnnnnnnnnnnnnnnnnnnnnnnnnnnnnnnnnnnnnnnnnnnnnnnnnnnnnnnnnnnnnnnnnnnnnnnnnnnnnnnnnnnnnnnnnnnnnnnnnnnnnnnnnnnnnnnnnnnnnnnnnnnnnnnnnnnnnnnnnnnnnnnnnnnnnnnnnnnnnnnnnnnnnnnnnnnnnnnnnnnnnnnnnnnnnnnnnnnnnnnnnnnnnnnnnnnnnnnnnnnnnnnnnnnnnnnnnnnnnnnnnnnnnnnnnnnnnnnnnnnnnnnnnnnnnnnnnnnnnnnnnnnnnnnnnnnnnnnnnnnnnnnnnnnnnnnnnnnnnnnnnnnnnnnnnnnnnnnnnnnnnnnnnnnnnnnnnnnnnnnnnnnnnnnnnnnnnnnnnnnnnnnnnnnnnnnnnnnnnnnnnnnnnnnnnnnnnnnnnnnnnnnnnnnnnnnnnnnnnnnnnnnnnnnnnnnnnnnnnnnnnnnnnnnnnnnnnnnnnnnnnnnnnnnnnnnnnnnnnnnnnnnnnnnnnnnnnnnnnnnnnnnnnnnnnnnnnnnnnnnnnnnnnnnnnnnnnnnnnnnnnnnnnnnnnnnnnnnnnnnnnnnnnnnnnnnnnnnnnnnnnnnnnnnnnnnnnnnnnnnnnnnnnnnnnnnnnnnnnnnnnnnnnnnnnnnnnnnnnnnnnnnnnnnnnnnnnnnnnnnnnnnnnnnnnnnnnnnnnnnnnnnnnnnnnnnnnnnnnnnnnnnnnnnnnnnnnnnnnnnnnnnnnnnnnnnnnnnnnnnnnnnnnnnnnnnnnnnnnnnnnnnnnnnnnnnnnnnnnnnnnnnnnnnnnnnnnnnnnnnnnnnnnnnnnnnnnnnnnnnnnnnnnnnnnnnnnnnnnnnnnnnnnnnnnnnnnnnnnnnnnnnnnnnnnnnnnnnnnnnnnnnnnnnnnnnnnnnnnnnnnnnnnnnnnnnnnnnnnnnnnnnnnnnnnnnnnnnnnnnnnnnnnnnnnnnnnnnnnnnnnnnnnnnnnnnnnnnnnnnnnnnnnnnnnnnnnnnnnnnnnnnnnnnnnnnnnnnnnnnnnnnnnnnnnnnnnnnnnnnnnnnnnnnnnnnnnnnnnnnnnnnnnnnnnnnnnnnnnnnnnnnnnnnnnnnnnnnnnnnnnnnnnnnnnnnnnnnnnnnnnnnnnnnnnnnnnnnnnnnnnnnnnnnnnnnnnnnnnnnnnnnnnnnnnnnnnnnnnnnnnnnnnnnnnnnnnnnnnnnnnnnnnnnnnnnnnnnnnnnnnnnnnnnnnnnnnnnnnnnnnnnnnnnnnnnnnnnnnnnnnnnnnnnnnnnnnnnnnnnnnnnnnnnnnnnnnnnnnnnnnnnnnnnnnnnnnnnnnnnnnnnnnnnnnnnnnnnnnnnnnnnnnnnnnnnnnnnnnnnnnnnnnnnnnnnnnnnnnnnnnnnnnnnnnnnnnnnnnnnnnnnnnnnnnnnnnnnnnnnnnnnnnnnnnnnnnnnnnnnnnnnnnnnnnnnnnnnnnnnnnnnnnnnnnnnnnnnnnnnnnnnnnnnnnnnnnnnnnnnnnnnnnnnnnnnnnnnnnnnnnnnnnnnnnnnnnnnnnnnnnnnnnnnnnnnnnnnnnnnnnnnnnnnnnnnnnnnnnnnnnnnnnnnnnnnnnnnnnnnnnnnnnnnnnnnnnnnnnnnnnnnnnnnnnnnnnnnnnnnnnnnnnnnnnnnnnnnnnnnnnnnnnnnnnnnnnnnnnnnnnnnnnnnnnnnnnnnnnnnnnnnnnnnnnnnnnnnnnnnnnnnnnnnnnnnnnnnnnnnnnnnnnnnnnnnnnnnnnnnnnnnnnnnnnnnnnnnnnnnnnnnnnnnnnnnnnnnnnnnnnnnnnnnnnnnnnnnnnnnnnnnnnnnnnnnnnnnnnnnnnnnnnnnnnnnnnnnnnnnnnnnnnnnnnnnnnnnnnnnnnnnnnnnnnnnnnnnnnnnnnnnnnnnnnnnnnnnnnnnnnnnnnnnnnnnnnnnnnnnnnnnnnnnnnnnnnnnnnnnnnnnnnnnnnnnnnnnnnnnnnnnnnnnnnnnnnnnnnnnnnnnnnnnnnnnnnnnnnnnnnnnnnnnnnnnnnnnnnnnnnnnnnnnnnnnnnnnnnnnnnnnnnnnnnnnnnnnnnnnnnnnnnnnnnnnnnnnnnnnnnnnnnnnnnnnnnnnnnnnnnnnnnnnnnnnnnnnnnnnnnnnnnnnnnnnnnnnnnnnnnnnnnnnnnnnnnnnnnnnnnnnnnnnnnnnnnnnnnnnnnnnnnnnnnnnnnnnnnnnnnnnnnnnnnnnnnnnnnnnnnnnnnnnnnnnnnnnnnnnnnnnnnnnnnnnnnnnnnnnnnnnnnnnnnnnnnnnnnnnnnnnnnnnnnnnnnnnnnnnnnnnnnnnnnnnnnnnnnnnnnnnnnnnnnnnnnnnnnnnnnnnnnnnnnnnnnnnnnnnnnnnnnnnnnnnnnnnnnnnnnnnnnnnnnnnnnnnnnnnnnnnnnnnnnnnnnnnnnnnnnnnnnnnnnnnnnnnnnnnnnnnnnnnnnnnnnnnnnnnnnnnnnnnnnnnnnnnnnnnnnnnnnnnnnnnnnnnnnnnnnnnnnnnnnnnnnnnnnnnnnnnnnnnnnnnnnnnnnnnnnnnnnnnnnnnnnnnnnnnnnnnnnnnnnnnnnnnnnnnnnnnnnnnnnnnnnnnnnnnnnnnnnnnnnnnnnnnnnnnnnnnnnnnnnnnnnnnnnnnnnnnnnnnnnnnnnnnnnnnnnnnnnnnnnnnnnnnnnnnnnnnnnnnnnnnnnnnnnnnnnnnnnnnnnnnnnnnnnnnnnnnnnnnnnnnnnnnnnnnnnnnnnnnnnnnnnnnnnnnnnnnnnnnnnnnnnnnnnnnnnnnnnnnnnnnnnnnnnnnnnnnnnnnnnnnnnnnnnnnnnnnnnnnnnnnnnnnnnnnnnnnnnnnnnnnnnnnnnnnnnnnnnnnnnnnnnnnnnnnnnnnnnnnnnnnnnnnnnnnnnnnnnnnnnnnnnnnnnnnnnnnnnnnnnnnnnnnnnnnnnnnnnnnnnnnnnnnnnnnnnnnnnnnnnnnnnnnnnnnnnnnnnnnnnnnnnnnnnnnnnnnnnnnnnnnnnnnnnnnnnnnnnnnnnnnnnnnnnnnnnnnnnnnnnnnnnnnnnnnnnnnnnnnnnnnnnnnnnnnnnnnnnnnnnnnnnnnnnnnnnnnnnnnnnnnnnnnnnnnnnnnnnnnnnnnnnnnnnnnnnnnnnnnnnnnnnnnnnnnnnnnnnnnnnnnnnnnnnnnnnnnnnnnnnnnnnnnnnnnnnnnnnnnnnnnnnnnnnnnnnnnnnnnnnnnnnnnnnnnnnnnnnnnnnnnnnnnnnnnnnnnnnnnnnnnnnnnnnnnnnnnnnnnnnnnnnnnnnnnnnnnnnnnnnnnnnnnnnnnnnnnnnnnnnnnnnnnnnnnnnnnnnnnnnnnnnnnnnnnnnnnnnnnnnnnnnnnnnnnnnnnnnnnnnnnnnnnnnnnnnnnnnnnnnnnnnnnnnnnnnnnnnnnnnnnnnnnnnnnnnnnnnnnnnnnnnnnnnnnnnnnnnnnnnnnnnnnnnnnnnnnnnnnnnnnnnnnnnnnnnnnnnnnnnnnnnnnnnnnnnnnnnnnnnnnnnnnnnnnnnnnnnnnnnnnnnnnnnnnnnnnnnnnnnnnnnnnnnnnnnnnnnnnnnnnnnnnnnnnnnnnnnnnnnnnnnnnnnnnnnnnnnnnnnnnnnnnnnnnnnnnnnnnnnnnnnnnnnnnnnnnnnnnnnnnnnnnnnnnnnnnnnnnnnnnnnnnnnnnnnnnnnnnnnnnnnnnnnnnnnnnnnnnnnnnnnnnnnnnnnnnnnnnnnnnnnnnnnnnnnnnnnnnnnnnnnnnnnnnnnnnnnnnnnnnnnnnnnnnnnnnnnnnnnnnnnnnnnnnnnnnnnnnnnnnnnnnnnnnnnnnnnnnnnnnnnnnnnnnnnnnnnnnnnnnnnnnnnnnnnnnnnnnnnnnnnnnnnnnnnnnnnnnnnnnnnnnnnnnnnnnnnnnnnnnnnnnnnnnnnnnnnnnnnnnnnnnnnnnnnnnnnnnnnnnnnnnnnnnnnnnnnnnnnnnnnnnnnnnnnnnnnnnnnnnnnnnnnnnnnnnnnnnnnnnnnnnnnnnnnnnnnnnnnnnnnnnnnnnnnnnnnnnnnnnnnnnnnnnnnnnnnnnnnnnnnnnnnnnnnnnnnnnnnnnnnnnnnnnnnnnnnnnnnnnnnnnnnnnnnnnnnnnnnnnnnnnnnnnnnnnnnnnnnnnnnnnnnnnnnnnnnnnnnnnnnnnnnnnnnnnnnnnnnnnnnnnnnnnnnnnnnnnnnnnnnnnnnnnnnnnnnnnnnnnnnnnnnnnnnnnnnnnnnnnnnnnnnnnnnnnnnnnnnnnnnnnnnnnnnnnnnnnnnnnnnnnnnnnnnnnnnnnnnnnnnnnnnnnnnnnnnnnnnnnnnnnnnnnnnnnnnnnnnnnnnnnnnnnnnnnnnnnnnnnnnnnnnnnnnnnnnnnnnnnnnnnnnnnnnnnnnnnnnnnnnnnnnnnnnnnnnnnnnnnnnnnnnnnnnnnnnnnnnnnnnnnnnnnnnnnnnnnnnnnnnnnnnnnnnnnnnnnnnnnnnnnnnnnnnnnnnnnnnnnnnnnnnnnnnnnnnnnnnnnnnnnnnnnnnnnnnnnnnnnnnnnnnnnnnnnnnnnnnnnnnnnnnnnnnnnnnnnnnnnnnnnnnnnnnnnnnnnnnnnnnnnnnnnnnnnnnnnnnnnnnnnnnnnnnnnnnnnnnnnnnnnnnnnnnnnnnnnnnnnnnnnnnnnnnnnnnnnnnnnnnnnnnnnnnnnnnnnnnnnnnnnnnnnnnnnnnnnnnnnnnnnnnnnnnnnnnnnnnnnnnnnnnnnnnnnnnnnnnnnnnnnnnnnnnnnnnnnnnnnnnnnnnnnnnnnnnnnnnnnnnnnnnnnnnnnnnnnnnnnnnnnnnnnnnnnnnnnnnnnnnnnnnnnnnnnnnnnnnnnnnnnnnnnnnnnnnnnnnnnnnnnnnnnnnnnnnnnnnnnnnnnnnnnnnnnnnnnnnnnnnnnnnnnnnnnnnnnnnnnnnnnnnnnnnnnnnnnnnnnnnnnnnnnnnnnnnnnnnnnnnnnnnnnnnnnnnnnnnnnnnnnnnnnnnnnnnnnnnnnnnnnnnnnnnnnnnnnnnnnnnnnnnnnnnnnnnnnnnnnnnnnnnnnnnnnnnnnnnnnnnnnnnnnnnnnnnnnnnnnnnnnnnnnnnnnnnnnnnnnnnnnnnnnnnnnnnnnnnnnnnnnnnnnnnnnnnnnnnnnnnnnnnnnnnnnnnnnnnnnnnnnnnnnnnnnnnnnnnnnnnnnnnnnnnnnnnnnnnnnnnnnnnnnnnnnnnnnnnnnnnnnnnnnnnnnnnnnnnnnnnnnnnnnnnnnnnnnnnnnnnnnnnnnnnnnnnnnnnnnnnnnnnnnnnnnnnnnnnnnnnnnnnnnnnnnnnnnnnnnnnnnnnnnnnnnnnnnnnnnnnnnnnnnnnnnnnnnnnnnnnnnnnnnnnnnnnnnnnnnnnnnnnnnnnnnnnnnnnnnnnnnnnnnnnnnnnnnnnnnnnnnnnnnnnnnnnnnnnnnnnnnnnnnnnnnnnnnnnnnnnnnnnnnnnnnnnnnnnnnnnnnnnnnnnnnnnnnnnnnnnnnnnnnnnnnnnnnnnnnnnnnnnnnnnnnnnnnnnnnnnnnnnnnnnnnnnnnnnnnnnnnnnnnnnnnnnnnnnnnnnnnnnnnnnnnnnnnnnnnnnnnnnnnnnnnnnnnnnnnnnnnnnnnnnnnnnnnnnnnnnnnnnnnnnnnnnnnnnnnnnnnnnnnnnnnnnnnnnnnnnnnnnnnnnnnnnnnnnnnnnnnnnnnnnnnnnnnnnnnnnnnnnnnnnnnnnnnnnnnnnnnnnnnnnnnnnnnnnnnnnnnnnnnnnnnnnnnnnnnnnnnnnnnnnnnnnnnnnnnnnnnnnnnnnnnnnnnnnnnnnnnnnnnnnnnnnnnnnnnnnnnnnnnnnnnnnnnnnnnnnnnnnnnnnnnnnnnnnnnnnnnnnnnnnnnnnnnnnnnnnnnnnnnnnnnnnnnnnnnnnnnnnnnnnnnnnnnnnnnnnnnnnnnnnnnnnnnnnnnnnnnnnnnnnnnnnnnnnnnnnnnnnnnnnnnnnnnnnnnnnnnnnnnnnnnnnnnnnnnnnnnnnnnnnnnnnnnnnnnnnnnnnnnnnnnnnnnnnnnnnnnnnnnnnnnnnnnnnnnnnnnnnnnnnnnnnnnnnnnnnnnnnnnnnnnnnnnnnnnnnnnnnnnnnnnnnnnnnnnnnnnnnnnnnnnnnnnnnnnnnnnnnnnnnnnnnnnnnnnnnnnnnnnnnnnnnnnnnnnnnnnnnnnnnnnnnnnnnnnnnnnnnnnnnnnnnnnnnnnnnnnnnnnnnnnnnnnnnnnnnnnnnnnnnnnnnnnnnnnnnnnnnnnnnnnnnnnnnnnnnnnnnnnnnnnnnnnnnnnnnnnnnnnnnnnnnnnnnnnnnnnnnnnnnnnnnnnnnnnnnnnnnnnnnnnnnnnnnnnnnnnnnnnnnnnnnnnnnnnnnnnnnnnnnnnnnnnnnnnnnnnnnnnnnnnnnnnnnnnnnnnnnnnnnnnnnnnnnnnnnnnnnnnnnnnnnnnnnnnnnnnnnnnnnnnnnnnnnnnnnnnnnnnnnnnnnnnnnnnnnnnnnnnnnnnnnnnnnnnnnnnnnnnnnnnnnnnnnnnnnnnnnnnnnnnnnnnnnnnnnnnnnnnnnnnnnnnnnnnnnnnnnnnnnnnnnnnnnnnnnnnnnnnnnnnnnnnnnnnnnnnnnnnnnnnnnnnnnnnnnnnnnnnnnnnnnnnnnnnnnnnnnnnnnnnnnnnnnnnnnnnnnnnnnnnnnnnnnnnnnnnnnnnnnnnnnnnnnnnnnnnnnnnnnnnnnnnnnnnnnnnnnnnnnnnnnnnnnnnnnnnnnnnnnnnnnnnnnnnnnnnnnnnnnnnnnnnnnnnnnnnnnnnnnnnnnnnnnnnnnnnnnnnnnnnnnnnnnnnnnnnnnnnnnnnnnnnnnnnnnnnnnnnnnnnnnnnnnnnnnnnnnnnnnnnnnnnnnnnnnnnnnnnnnnnnnnnnnnnnnnnnnnnnnnnnnnnnnnnnnnnnnnnnnnnnnnnnnnnnnnnnnnnnnnnnnnnnnnnnnnnnnnnnnnnnnnnnnnnnnnnnnnnnnnnnnnnnnnnnnnnnnnnnnnnnnnnnnnnnnnnnnnnnnnnnnnnnnnnnnnnnnnnnnnnnnnnnnnnnnnnnnnnnnnnnnnnnnnnnnnnnnnnnnnnnnnnnnnnnnnnnnnnnnnnnnnnnnnnnnnnnnnnnnnnnngagtctcgacggagtacgagcggctacgcgttcatgatgaacggcggatgcatcagctggcgaagcaagaagcagcgcacgatggcgctctcgtcgacggaagccgagtacatggcgctgtcggaggccacgcaggaggcggtgtggctcaaggtgtttctgtgcgagctgggcgagatggcgagcgatgaagcggtgaagatctacgaggacaaccaaggctccatcgcgttggccaagaacccggagttccacaagcgcaccaagcacatcgacattcgctaccacttcgtgcgcgagaaggtggaagacggtcaagtggtgttgcagtatgtttcgacactcgacatgctggcggacatcatgacgaagccgatcgcggcgccgcagttcgacgcgctcaggacgaagctgggcatcgtggtcgctgacgagtcgagtgggagtgttgtcaagactgatgtgacgacgcctcgccaagcgaccgtgtgacgcgaacgcgtcatcagtgaggtcggcgtgaccttcactgtgttgtaccgcaatcattcaggtaattacgggacgatgattacgtcacggtgattacgccaagattgtgggtacaagatgggcatcgacgtggcgttctctgattggataaggtaactgtgtatccagtagagaatccagtagggtgtacccagtaagaggtatccagtagcaggcttagaggtagcacgcggttgcgaactaaggacctgaatcgaatcactttgcattttgccaactactgctcaagtgttcttccttttggttatgagcccaagccccgtcttccctgaccaagaccccgactacgccttcgccatggacgccgccccgaccgcgaccgcccgcatcaacaagttcgacggaaccaacttccacacatggaagttcaagatgcagatggtgctggaggagcgcgaactgtgggaagtgacgagtggggaagtgaagctcgagcagtgcacgaccgcggcggaccaagcgacgtttcgcaagaagtcgcgcaaggcgctggcgatcgtctgtctcgcgttggaggactcgcagctgccgctggtgcggtcggcgaaggacgcgcatgatgcatggtcaagactcgagggacacttcgagaagaagagcctggcgaacaagctctttcttcgtcgacggttcttcacgacaacgatggacgaaggtgatgatgtgctggagcacattaacaagctcaagacgctggcggaacagctcgacgcggtcggcgctccggtcagcgaggacgacttggtaatcacgcttcttgccagtctgagcgagtcgtaccagttcctcatcacggcgttggaatcgcgttccgacacgctgacgtgggagctcgtgacgtctcggctcctgcacgaggacatgaagcgcaaggaacaaggtggcggtgctgacggaaccgcgcacgctcaaggtcaagcgttcatgacaagcgacaacgggaagcgcaagggacggcaggcgcaagcgcagaggacgagcgcctgtcactactgcggcgagcacggacattggatcgccaagtgtccggtgcggatccgcgagaacggggagcggcagaggccgcaacgagcgaacgtcgcgcaggtcgaagatgactctggcgacttcctcttctcggttggtggcgacacgggtgcctccaagctgagcggcatgtggctggtcgactcaggtgcgacgcagcacatgacgtactcgaaggagtacatgaagaactacaagaagatctctccggtggacgtgcatctggcggacgacggcgtggttcaggcggtggggagcggcgacatcgtgatgtcgatgcagacaccgcgcggcatgaagaagggtgtgctcacgggtgtgtggcacatcccgaagctgtcgcgcaacctgttctccgtcggccgcttcaccaaggacgtcgggccagtgaccttcgagagcgacgggtgcttcgcggaaacgaagggtctcaagtggaagctcggcgctcgcgaaggcaaaggactgttcaagctctgcatgacgccgaggacgcctgctgacgaggccaatgcggcaagctcgaagaatcgccaaggggacaccacgtcgtacctctggcaccttcgacttggtcacatcggccatggtggtctcgacgccatcgtcaagaagggctacggcactggcatcccaatgacgtcggtgaagcagtgggaggtgtgcgacgggtgcgcactcggcaagcaaacgcgagtaagcttcatgaagtcgtcgccgaaccgtgcgaagcaagtgctggaggtggtccacagcgatgtgtgcggtccgatgcagacggcgacgttcggaggcaagcgctacttcgtcacgttcatcgacgacaagtcgcacttctgcgtggtgtacctgctacggaccaagtcggaggtggctgccaagttcgctgcgttcgtcgcgttggctgagacgcagaccggcaagcgagtgaaggtgcttcggagcgacaacggcggcgagtacacttcgggtgcgatggccaagttgtgtgcggatcgtggcatcgagcagaagttcacgccgccatacacgcctcagctcaacggagtggccgagcgaatgaatcggacgctggtggagtgtgcgcgctgcatgctggagcacgccgggttgtcgaaggagtactggggagaagcggtgatgacggccacgttcctccgcaaccggtgtccgacgcgcgccatcagtcacgacaagtcgccgcaccacgtttggaccggcaagaagcctttgctggccaacctcaaggtgttcgggtgccacgcgtacgtgcacgtgccgaaggagaagcggtcgaagttcgacgctcggtcggtgcgctgtcgtttcctcgggtactcggagcacgagaaggcgtatcggttcgaggagatcgagagtggtcgcgtgttggtgagccgcgacgcgcagttcatggaggatgtcttcgacggtgggagacgcaactacgcttcgaaggaggtgttggtgggtcttccgacagatgatgatgaagacaccacggatgaagagactcagtccggatcagacgagaacagagaagaagctgcgcggaatcaagactttgaacccggcagcaagcgacacccgcgcacgcagtcgctcgaggaagtcgtggaggttccgagtgccaagcggtatgcggtgccaagacgacagcagccgctggacgagatgtctgccgcagcacaagagaaggaagacttcgaggctgcgtacgtcgtggattcagtgggagagatgccgacaacgttcaagtcggcaatggaatccagcgacgcagacaagtggaaagaggcgtgcgactcggaggtggagtcgctccgcaagaacgagacgtggaccctggtgccactgccgaagggacgcaaggcgatcggctgcagatgggtgttccgcgtgaaggagaaccagtctggagagatcgagcggttcaaggcgcgactggtggcgaaggggttctcgcagaagtacggcatcgactacgacgagacgttcgcgccggtggccaagttcacgtcgattcgggtgttgctgagtctggcggccaagtacaagctcacagtgcaccagatggatgtgaagaccgcgttcctcaacggcttgttggacgaggacatctacatggcgcagccggacggatatgtggacggagatcgacccgactacgtgtgccggctcaagcgttcgctgtacggcctgaagcagtcgccgcggatgtggaacaagacgatcgacgagttcatgttgaagctggggttcaagaagtgcgagtccgaccactgcatctacttgaagcgggacaatcacgacatgatgttcgtggcactgtacgtggacgatctggtcctcgccagcagcagcgacgggatgctgaaggacacgaagcaggcgctgagtgaccggttcgagatgaccgacatgggccagctcaagtactttctcggtatggagatcgagcaagatgtggcgactgggaaggtgtcggtgcggcagaccaagttcgcgaaggacattctcgagaagttcaagatggatgagagcaaccctgtgaagacaccgcaggatccgggtctgaagctgaccaaggccatgtgcgagggaggctgcaagcacgacgagaccatggcgaatgttccgtaccggaacgccgtgggctgcctcatgtatctcatggtggggactcgtccggacctcgcagcggcagtgggagtgctgagccagttcgcagcggacccatgtccgacacactggcaggcgctcaagagggtcttccgctacatccgaggcacgaagacgcacggcctcgtgtttcaagcgagcagcgaggacggactgcaaggctactcggacgcggactgggccggcgacatcgagtctcgacggagtacgagcggctacgcgttcatgatgaacggcggatgcatcagctggcgaagcaagaagcagcgcacggtggcgctctcgtcgacggaagccgagtacatggcgctgtcggaggccacgcaggaggcggtgtggctcaaggtgtttctgtgcgagctggacgagatggcgagcgatgaaggggtgaagatctacgaggacaaccaaggctccatcgcgttggccaagaacccggagttccacaagcgcaccaagcacatcgacattcgctaccacttcgtgcgcgagaaggtggaagacggtcaagtggtgttgcagtatgtttcgacactcgacatgctggcggacatcatgacgaagccgatcgcggcgccgcagttcgacgcgctcaggacgaagctgggcatcgtggtcgctgacgagtcgagtgggagtgttgtcaagactgatgtgacgacgccccgccaagcgaccgtgtgacgcgaacgcgtcatcagtgaggtcggcgtgaccttcactgtgtggtaccgaaatcattcaggtgattacgggacgatgattacgtcacggtgattacgccaagattgtgggtacaagatgggcatcgacgtggcgttctctgattggataaggtaactgtgtatccagtagagaatccagtagggtgtatccagtaagaggtatccagtagcaggcttagaggtagcacgcggttgcgaactaaggacctgaatcgaatcactttgcattttgccaactactgctcaagtgttcttcctttttcatcgcagttggaaattctcgttcggtgcttcaccacaaagtaaatagcatcgtggctcataacattaagtttgatgataatgtgattttatctgaattatatcgcagtggcaatgatgatgtagtttgtctgtggaagtaagacttctttcgactggtgcgaaactccaacgtagcatatgtcatatgaggcattagagagaccgtttttttgcaaccggagcgtagcggaggtctgcaatggtcggcgcgtaggccggagtagttgcactgcgaagtagttactatctttttaccgacgccttgcccgccatgagcgaagcgaagcgtagcagaattggcggtgcaaacgaggagctcacctgttctcggttaaatacgaaatgaggtcaacggatgaaggagagacggctgtcatcacctgttccttctgtcactacaaatggtttaattaagtttgtttcggacaaggcaatcacattcaaagaactattttttaattactagatatccaatcgaatcattttttgtggctgagatgtgtctcgtttaaccagacgagggcgccttttgggtggcttggaattgcgacgcgcagctcgatccagccaagtcattgcggcagagttgtttctcttggtcgcgcacgtagccataagtttgtgaaaatacttgtcgtccacgaatgagtatgtccagcgcagaaagtcaatcgaactcgattgacacgaccgcacagccagtatggtctttataggtttcatgtaggtgttattgagggttgctggtcttgggtactgtgtaccagttgtacccattaaccggttaacccgaaccggtccaatccgaacccacgttgattatggtgattacggtaagttgtttatgttgtcaagactgatgtgacgacgccccgccaagcgaccgtgtgacgcgaacgcgtcatcagtgaggtcggcgtgaccttcactgtgtggtaccgaaatcattcaggtgattacgggacgatgattacgtcacggtgattacgccaagattgtgggtacaagatgggcatcgacgtggcgttctctgattggataaggtaactgtgtatccagtagagaatccagtagggtgtatccagtaagaggtatccagtagcaggcttagaggtagcacgcggttgcgaactaaggacctgaatcgaatcactttgcattttgccaactactgctcaagtgctcttccttttggttatgagcccaagccccgtcttccctgaccaagaccccgactacgccttcgccatggacgccgccccgaccgcgaccgcccgcatcaacaagttcgacggaaccaacttccacacatggaagttcaagatgcagatggtgctggaggagcgcgaactgtgggaagtgacgagtggggaagtgaagctcgagcagtgcacgaccgcggcggaccaagcgacgtttcgcaagaagtcgcgcaaggcgctggcgatcgtctgtctcgcgttggaggactcgcagctgccgctggtgcggtcggcgaaggacgcgcatgatgcatggtcaagactcgagggacacttcgagaagaagagcctggcgaacaagctctttcttcgtcgacggttcttcacgacaacgatggacgaaggtgatgatgtgctggagcacattaacaagctcaagacgctggcggaacagctcgacgcggtcggcgctccggtcagcgaggacgacttggtgatcacgcttcttgccagtctgagcgagtcgtaccagttcctcatcacggcgttggaatcgcgctccgacacgctgacgtgggagctcgtgacgtctcggctcctgcacgaggacatgaagcgcaaggaacaaggtggcggtgctgacggaaccgcgcacgctcaaggtcaagcgttcatgacaagcgacaacgggaagcgcaaaggacggcaggcgcaagcgcagaggacgagcgcctgtcactactgcggcgagcacggacattggatcgccaagtgtccggtgcggatccgcgagaacggggagcggcagaggccgcaacgagcgaacgtcgcgcaggtcgaagatgactctggcgacttcctcttctcggttggtggcgacacgggtgcctccaagctgagcggcatgtggctggtcgactcgggtgcgacgcagcacatgacgtactcgaaggagtacatgaagaattacaagaagatctctccggtggacgtgcatctggcggacgacggcgtggttcaggcggtggggagcggcgacatcgtgatgtcgatgcagacaccgcgcggcatgaagaagggtgtgctcacgggtgtgtggcacatcccgaagctgtcgcgcaacctgttctccgtcggccgcttcaccaaggacgtcgggccagtgaccttcgagagcgacgggtgctttgcggaaacgaagggtctcaagtggaagctcggcgctcgcgaaggcaaaggactgttcaagctctgcatgacgccgaggacgcctgctgacgaggccaatgcggcaagctcgaagaatcgccaaggggacaccacgtcgtacctctggcaccttcgacttggtcacatcggccatggtggtctcgacgccatcgtcaagaagggctacggcactggcatcccaatgacgtcggtgaagcagtgggaggtgtgcgacgggtgcgcactcggcaagcaaacgcgnnnnnnnnnnnnnnnnnnnnnnnnnnnnnnnnnnnnnnnnnnnnnnnnnnnnnnnnnnnnnnnnnnnnnnnnnnnnnnnnnnnnnnnnnnnnnnnnnnnnttggcgatccaatgtccgtgctcgccgcagtagtgacaggcgctcgtcctctgcgcttgcgcctgccgtcccttgcgcttcccgttgtcgcttgtcatgaacgcttgaccttgagcgtgcgcggttccgtcagcaccaccaccttgttccttgcgcttcatgtcctcgtgcaggagccgagacgtcacgagctcccacgtcagcgtgtcggaacgcgattccaacgccgtgatgaggaactggtacgactcgctcagactggcaagaagcgtgatcaccaagtcgtcctcgctgaccggagcgccgaccgcgtcgagctgttccgccagcgtcttgagcttgttaatgtgctccagcacatcatcaccttcgtccatcgttgtcgtgaagaaccgtcgacgaagaaagagcttgttcgccaggctcttcttctcgaagtgtccctcgagtcttgaccatgcatcatgcgcgtccttcgccgaccgcaccagcggcagctgcgagtcctccaacgcgagacagacgatcgccagcgccttgcgcgacttcttgcgaaacgtcgcttggtccgccgcggtcgtgcactgctcgagcttcacttccccactcgtcacttcccacagttcgcgctcctccagcaccatctgcatcttgaacttccatgtgtggaagttggttccgtcgaacttgttgatgcgggcggtcgcggtcggggcggcgtccatggcgaaggcgtagtcggggtcttggtcagggaagacggggcttgggctcataaccaaaaggaagaacacttgagcagtagttggcaaaatgcaaagtgattcgattcaggtccttagttcgcaaccgcgtgctacctctaagcctgctactggatacctcttactgggtacaccctactggattctctactggatacacagttaccttatccaatcagagaacgccacgtcgatgcccatcttgtacccacaatcttggcgtaatcaccgtgacgtaatcatcgtcccgtaatcacctgaatgattgcggtacaacacagtgaaggtcacgccgacctcactgatgacgcgttcgcgtcacacggtcgcttggcgaggcgtcgtcacatcagtcttgacaacatcttccaccttctcgcgcacgaagtggtagcgaatgtcgatgtgcttggtgcgcttgtggaactccgggttcttggccaacgcgatggagccttggttgtcctcgtagatcttcaccgcttcatcgctcgccatctcgcccagctcgcacagaaacaccttgagccacaccgcctcctgcgtggcctccgacagcgccatgtactcggcttccgtcgacgagagcgccaccgtgcgctgcttcttgcttcgccagctgatgcatccgccgttcatcatgaacgcgtagccgctcgtactccgtcgagactcgatgtcgccggcccagtccgcgtccgagtagccttgcagtccgtcctcgctgctcgcttgaaacacgaggccgtgcgtcttcgtgcctcggatgtagcggaagaccctcttgagcgcctgccagtgtgtcggacatgggtccgctgcgaactggctcagcactcccactgccgctgcgaggtccggacgagtccccaccatgagatacatgaggcagcccacggcgttccggtacggaacattcgccatggtctcgtcgtgcttgcagcctccctcgcacatggccttggtcagcttcagacccggatcctgcggtgtcttcacagggttgctctcatccatcttgaacttctcgagaatgtccttcgcgaacttggtctgccgcaccgacaccttcccagtcgccacatcttgctcgatctccataccgagaaagtacttgagctggcccatgtcggtcatctcgaaccggtcactcagcgcctgcttcgtgtccttcagcatcccgtcgctgctgctggcgaggaccagatcgtccacgtacagtgccacgaacatcatgtcgtgattgtcccgcttcaagtagatgcagtggtcggactcgcacttcttgaaccccagcttcaacatgaactcgtcgatcgtcttgttccacatccgcggcgactgcttcaggccgtacagcgaacgcttgagccggcacacgtagtcgggtcgatctccgtccacatatccgtccggctgcgccatgtagatgtcctcgtccaacaagccgttgaggaacgcggtcttcacatccatctggtgcactgtgagcttgtacttggccgccagactcagcaacacccgaatcgacgtgaacttggccaccggcgcgaacgtctcgtcgtagtcgatgccgtacttctgcgagaaccccttcgccaccagtcgcgccttgaaccgctcgatctctccagactggttctccttcacgcggaacacccatctgcagccgatcgccttgcgtcccttcggcagtggcaccagggtccacgtctcgttcttgcggagcgactccacctccgagtcgcacgcctctttccacttgtctgcgtcgctggattccatcgccgacttgaacgttgtcggcatctctcccactgaatccacgacgtacgcagcctcgaagtcttccttctcttgtgctgcggcagacatctcgtctagcggctgctgtcgtctcggcaccgcataccgcttggcactcggaacctccacggcttcctcgagcgactgcgtgcgcgggtgtcgcttgctgccgggttcaaagtcttgattccgcgcagcttcttctctgttctcgtctgatccggactgagtctcttcatccgtggtgtcttcatcatcatctgtcggaagacccaccaacacctccttcgaagcgtagtcgcgtctcccaccgtcgaagacatcctccatgaactgcgcgtcgcggctcaccaacacgcgaccgctctcgatctcctcgaaccgatacgccttctcgtgctccgagtacccgaggaaacgacagcgcaccgaccgagcgtcgaacttcgaccgcttctccttcggcacgtgcacgtacgcgtggcacccgaacaccttgaggttggccagcaaaggcttcttgccggtccaaacgtggtgcggcgacttgtcgtgactgatggcgcgcgtcggacaccggttgcggaggaacgtggccgtcatcaccgcttctccccagtactccttcgacaacccggcgtgctccagcatgcagcgcgcacactccaccagcgtccgattcattcgctcggccactccgttgagctgaggcgtgtatggcggcgtgaacttctgctcgatgccgcgatccgcacacaacttggccatcgcacccgaagtgtactcgccgccgttgtcgctccgaagcaccttcactcgcttgccggtctgcgtctcagccaacgcgacgaacgcagcgaacttggcagccacctccgacttgttccgtagtaggtacaccacgcagaagtgcgacttgtcgtcgatgaacgtgacgaagtagcgcttgcctccgaacgtcgccgtctgcatcggaccgcacacatcgctgtggaccacctccagcacttgcttcgcacggttcggcgacgacttcatgaagcttactcgcgtttgcttgccgagtgcgcacccgtcgcacacctcccactgcttcaccgacgtcattgggatgccagtgccgtagcccttcttgacgatggcgtcgagaccaccgtggccgatgtgaccaagtcgaaggtgccagaggtacgacgtggtgtccccttggcgattcttcgagcttgccgcattggcctcgtcagcaggcgtcctcggcgtcatgcagagcttgaacagtcctttgccttcgcgagcgccgagcttccacttgagacccttcgtttccgcgaagcacccgtcgctctcgaaggtcactggcccgacgtccttggtgaagcggccgacggagaacaggttgcgcgacagcttcgggatgtgccacacacccgtgagcacacccttcttcatgccgcgcggtgtctgcatcgacatcacgatgtcgccgctccccaccgcctgaaccacgccgtcgtccgccagatgcacgtccaccggagagatcttcttgtagttcttcatgtactccttcgagtacgtcatgtgctgcgtcgcacccgagtcgaccagccacatgccgctcagcttggaggcacccgtgtcgccaccaaccgagaagaggaagtcgccagagtcatcttcgacctgcgcgacgttcgctcgttgcggcctctgccgctccccgttctcgcggatccgcaccggacacttggcgatccaatgtccgtgctcgccgcagtagtgacaggcgctcgtcctctgcgcttgcgcctgccgtcccttgcgcttcccgttgtcgcttgtcatgaacgcttgaccttgagcgtgcgcggttccgtcagcaccgccaccttgttccttgcgcttcatgtcctcgtgcaggagccgagacgtcacgagctcccacgtcagcgtgtcggagcgcgattccaacgccgtgatgaggaactggtacgactcgctcagactggcaagaagcgtgatcaccaagtcgtcctcgctgaccggagcgccgaccgcgtcgagctgttccgccagcgtcttgagcttgttaatgtgctccagcacatcatcaccttcgtccatcgttgtcgtgaagaaccgtcgacgaagaaagagcttgttcgccaggctcttcttctcgaagtgtccctcgagtcttgaccatgcatcatgcgcgtccttcgccgaccgcaccagcggcagctgcgagtcctccaacgcgagacagacgatcgccagcgccttgcgcgacttcttgcgaaacgtcgcttggtccgccgcggtcgtgcactgctcgagcttcacttccccactcgtcacttcccacagttcgcgctcctccagcaccatctgcatcttgaacttccatgtgtggaagttggttccgtcgaacttgttgatgcgggcggtcgcggtcggggcggcgtccatggcgaaggcgtagtcggggtcttggtcagggaagacggggcttgggctcataaccaaaaggaagagcacttgagcagtagttggcaaaatgcaaagtgattcgattcaggtccttagttcgcaaccgcgtgctacctctaagcctgctactggatacctcttactggatacaccctactggattctctactggatacacagttaccttatccaatcagagaacgccacgtcgatgcccatcttgtacccacaatcttggcgtaatcaccgtgacgtaatcatcgtcccgtaatcacctgaatgatttcggtaccacacagtgaaggtcacgccgacctcactgatgacgcgttcgcgtcacacggtcgcttggcgaggcgtcgtcacatcagtcttgacaacactctacccctattgatctcggtaatgaacttatggagcttacttccgcaacactacagatgcagccgattgtcaccatcgacaatactacaaactctacatcgtatgatactgaatcgctagtaaccgaaggtggtgttggtattgcgaagagcttgaatgtaggacaagatgtagctatcggcggagatctatctatcaatggtacattctaccaatctggcacgatctctaccactgattcaactgaatatgtttcgacgattactggtgctatcacaactgccggcggtattggtatcggcaagagcattaacgttggcttcaatgcgactattggaggagctgtagtgatcagtggtacaacatctattgatgatgatgtaaccatcaccagtgtattacaatctactacgtgggcatccggatcactagtcacttacggtggcgttggtatcgccaagaacctacacgttggcggtagtatcgtagcagaaagaaatttatctatcactggtactactcttcagactggtgtattcacttctgaaaacccaactgagcctacatctacttccactggagcaattgttgttgaaggtggtgttggtactgctcaaagcatttccgttggcgctgatgcatctattgagggagacctttcagtgatgggcaccaccgatctaaacggagaagtttccatcattagtcctactgatgcaacttccgcttctgttggtggagcattcacagtgaatggaggcgttggtattggtaagtcactatttgtaggggataatgtttttgctgagggcagctttaccatcggcggaactacttcactaacgggagatgtatacattgatagtgatggaaggtatggatcatggacacgaagctcggacgaagcggagggagggacgtcgcagacggcgggaccgaagcgaaggcacttgaggggtagaatgaagattcgaaagtgattgaattgttggagcttacaccctactgtcatagacacgcgaccctgcgtcctatcacctagtgcacctattgagggttgctggtcttgggtactgtgtaccagnnnnnnnnnnnnnnnnnnnnnnnnnnnnnnnnnnnnnnnnnnnnnnnnnnnnnnnnnnnnnnnnnnnnnnnnnnnnnnnnnnnnnnnnnnnnnnnnnnnnnnnnnnnnnnnnnnnnnnnnnnnnnnnnnnnnnnnnnnnnnnnnnnnnnnnnnnnnnnnnnnnnnnnnnnnnnnnnnnnnnnnnnnnnnnnnnnnnnnnnnnnnnnnnnnnnnnnnnnnnnnnnnnnnnnnnnnnnnnnnnnnnnnnnnnnnnnnnnnnnnnnnnnnnnnnnnnnnnnnnnnnnnnnnnnnnnnnnnnnnnnnnnnnnnnnnnnnnnnnnnnnnnnnnnnnnnnnnnnnnnnnnnnnnnnnnnnnnnnnnnnnnnnnnnnnnnnnnnnnnnnnnnnnnnnnnnnnnnnnnnnnnnnnnnnnnnnnnnnnnnnnnnnnnnnnnnnnnnnnnnnnnnnnnnnnnnnnnnnnnnnnnnnnnnnnnnnnnnnnnnnnnnnnnnnnnnnnnnnnnnnnnnnnnnnnnnnnnnnnnnnnnnnnnnnnnnnnnnnnnnnnnnnnnnnnnnnnnnnnnnnnnnnnnnnnnnnnnnnnnnnnnnnnnnnnnnnnnnnnnnnnnnnnnnnnnnnnnnnnnnnnnnnnnnnnnnnnnnnnnnnnnnnnnnnnnnnnnnnnnnnnnnnnnnnnnnnnnnnnnnnnnnnnnnnnnnnnnnnnnnnnnnnnnnnnnnnnnnnnnnnnnnnnnnnngccgacggcaacaaggcggccatcatgggtgtggggaccatcgtggaacgagtggttctgcccaacggcgacgagcgcgacatcgagatcaagaacgcgctgtacgtcccaagcatgagcaagaatctgctttcggtgccacagatcaacaagagtggtctgttccaagtcgtgttcgacagcaccaagatgcagattgcgcacaagggctccaagctagtggtggcgacggcaaacctcgtggatggactctactggctccagacgcctcagcgatcggcgaatgcggcgaccagtgggaagacggtcgacttacacgcgcgtatgggtcacgctccggtggaggtgcttcgcaagatggtcgacaacaacatgatcaaggacgcgaaggcaccttccaagtcgagtggaccaagcgtgtgtcgcggctgccagcaagggaaaatggtccagaagccgttcccaagcagccgtgacaagcgtcactacgacacgttcgagctgctccacttcgacgtgtgcggccccatggaagaagagtcactgggtggcagcaagtatctgctgctgatcgtggacgaagccagcggatgcatgaaggggttctgcctgcgtgccaagtcggagagcgaggactgcatcaagatgtacgtcacgaaggtgcagacgcagttcggcaagaaggtcaagtttgtgcggcacgacggagcccgtgagttcgcgaccaactcgctcaaggccttctacgaagtcgaaggcatcgagcagcaaaccacggttccgtacgcacaccagaccaacggcacggcagaacgcgccatccggaccatcgtcacgattggccgcagcatgctgcatcacgccaagctggacaagagcttctgggctgaggcggccatgacagccatctacgtgaagaatcgtctgccatcacccaagatcgaacacagactccgttcgagatcgtttacaagtccaagccgagtgtgaagcacatgcgtgtgttcggatgccagacgtacatcctgacgccgaaggaaagacggcgcaagtgggaccccaaggctcgcgccgggctgttcctcggctacgaagaagtgtccaaggcgtatcgagtttatgacatcgaggcggggcaggtggttatcagtcgcgatgtcaacttcgatgagtcgacctttggactttcgacgcatacttcggatgaagacgtcgatgatgctgtgctggacttggacgcgctggacctggacgacaacgatggaccgcgccaaacgagcttcaagcaggcggggaagcgcaagtaccgaccgagtggcgacgacaacactgccagaaggtcgcgccccgttcgccaccgagctggcttagaagaagcaagtgcgccggacgtatcctcctcgcgccgagccgaccccgacgaagaagaaaagtctggggaccaagatgaagacgacgactcgacgcctccagtgttttggcgtgccagtgccaacgctgtggaagcagcagccgatctatcggagccgacgacgttccaagaggctgtgaacggtcctgatcaagtgcactggcgcaaagcgatccgcgcggagctcaagtcgatgcgactgcgtggtgtgtttcgagctgccaagttgcctaacggacaacgcgccatcgataccaagtgggtgttcaagatcaagcgcaaagcggacggctcgatcgagaagtacaaggcgcgcctcgtggccaagggcttcaagcagaagtacgggattgactacaccgagacgttctcgcccgtggtcaagtatgtgacactgcgcatggtgatcgcgattgctaagtattttggctggcccctcgaccaactcgacgtggtgacagcattcctgtacgggataatgaaggaggtggtcttctgcgtggttccggaaggcgtcgaactggatggtgacttcgactgcctggaactggtgaaggccatctacggtctcaagcaagcttcgcgagtgtggaacgagaccttcgacgagttcgtgtgctccatcggcttccaagtgtcggccttcgatccgtgcctctacatcgaggtggtggacggtcactgcgtgcttgtactggtgtacgtggatgacgtactgattaccnnnnnnnnnnnnnnnnnnnnnnnnnnnnnnnnnnnnnnnnnnnnnnnnnnnnnnnnnnnnnnnnnnnnnnnnnnnnnnnnnnnnnnnnnnnnnnnnnnnnnnnnnnnnnnnnnnnnnnnnnnnnnnnnnnnnnnnnnnnnnnnnnnnnnnnnnnnnnnnnnnnnnnnnnnnnnnnnnnnnnnnnnnnnnnnnnnnnnnnnnnnnnnnnnnnnnnnnnnnnnnnnnnnnnnnnnnnnnnnnnnnnnnnnnnnnnnnnnnnnnnnnnnnnnnnnnnnnnnnnnnnnnnnnnnnnnnnnnnnnnnnnnnnnnnnnnnnnnnnnnnnnnnnnnnnnnnnnnnnnnnnnnnnnnnnnnnnnnnnnnnnnnnnnnnnnnnnnnnnnnnnnnnnnnnnnnnnnnnnnnnnnnnnnnnnnnnnnnnnnnnnnnnnnnnnnnnnnnnnnnnnnnnnnnnnnnnnnnnnnnnnnnnnnnnnnnnnnnnnnnnnnnnnnnnnnnnnnnnnnnnnnnnnnnnnnnnnnnnnnnnnnnnnnnnnnnnnnnnnnnnnnnnnnnnnnnnnnnnnnnnnnnnnnnnnnnnnnnnnnnnnnnnnnnnnnnnnnnnnnnnnnnnnnnnnnnnnnnnnnnnnnnnnnnnnnnnnnnnnnnnnnnnnnnnnnnnnnnnnnnnnnnnnnnnnnnnnnnnnnnnnnnnnnnnnnnnnnnnnnnnnnnnnnnnnnnnnnnnnnnnnnnnnnnnnnnnnnnnnnnnnnnnnnnnnnnnnnnnnnnnnnnnnnnnnnnnnnnnnnnnnnnnnnnnnnnnnnnnnnnnnnnnnnnnnnnnnnnnnnnnnnnnnnnnnnnnnnnnnnnnnnnnnnnnnnnnnnnnnnnnnnnnnnnnnnnnnnnnnnnnnnnnnnnnnnnnnnnnnnnnnnnnnnnnnnnnnnnnnnnnnnnnnnnnnnnnnnnnnnnnnnnnnnnnnnnnnnnnnnnnnnnnnnnnnnnnnnnnnnnnnnnnnnnnnnnnnnnnnnnnnnnnnnnnnnnnnnnnnnnnnnnnnnnnnnnnnnnnnnnnnnnnnnnnnnnnnnnnnnnnnnnnnnnnnnnnnnnnnnnnnnnnnnnnnnnnnnnnnnnnnnnnnnnnnnnnnnnnnnnnnnnnnnnnnnnnnnnnnnnnnnnnnnnnnnnnnnnnnnnnnnnnnnnnnnnnnnnnnnnnnnnnnnnnnnnnnnnnnnnnnnnnnnnnnnnnnnnnnnnnnnnnnnnnnnnnnnnnnnnnnnnnnnnnnnnnnnnnnnnnnnnnnnnnnnnnnnnnnnnnnnnnnnnnnnnnnnnnnnnnnnnnnnnnnnnnnnnnnnnnnnnnnnnnnnnnnnnnnnnnnnnnnnnnnnnnnnnnnnnnnnnnnnnnnnnnnnnnnnnnnnnnnnnnnnnnnnnnnnnnnnnnnnnnnnnnnnnnnnnnnnnnnnnnnnnnnnnnnnnnnnnnnnnnnnnnnnnnnnnnnnnnnnnnnnnnnnnnnnnnnnnnnnnnnnnnnnnnnnnnnnnnnnnnnnnnnnnnnnnnnnnnnnnnnnnnnnnnnnnnnnnnnnnnnnnnnnnnnnnnnnnnnnnnnnnnnnnnnnnnnnnnnnnnnnnnnnnnnnnnnnnnnnnnnnnnnnnnnnnnnnnnnnnnnnnnnnnnnnnnnnnnnnnnnnnnnnnnnnnnnnnnnnnnnnnnnnnnnnnnnnnnnnnnnnnnnnnnnnnnnnnnnnnnnnnnnnnnnnnnnnnnnnnnnnnnnnnnnnnnnnnnnnnnnnnnnnnnnnnnnnnnnnnnnnnnnnnnnnnnnnnnnnnnnnnnnnnnnnnnnnnnnnnnnnnnnnnnnnnnnnnnnnnnnnnnnnnnnnnnnnnnnnnnnnnnnnnnnnnnnnnnnnnnnnnnnnnnnnnnnnnnnnnnnnnnnnnnnnnnnnnnnnnnnnnnnnnnnnnnnnnnnnnnnnnnnnnnnnnnnnnnnnnnnnnnnnnnnnnnnnnnnnnnnnnnnnnnnnnnnnnnnnnnnnnnnnnnnnnnnnnnnnnnnnnnnnnnnnnnnnnnnnnnnnnnnnnnnnnnnnnnnnnnnnnnnnnnnnnnnnnnnnnnnnnnnnnnnnnnnnnnnnnnnnnnnnnnnnnnnnnnnnnnnnnnnnnnnnnnnnnnnnnnnnnnnnnnnnnnnnnnnnnnnnnnnnnnnnnnnnnnnnnnnnnnnnnnnnnnnnnnnnnnnnnnnnnnnnnnnnnnnnnnnnnnnnnnnnnnnnnnnnnnnnnnnnnnnnnnnnnnnnnnnnnnnnnnnnnnnnnnnnnnnnnnnnnnnnnnnnnnnnnnnnnnnnnnnnnnnnnnnnnnnnnnnnnnnnnnnnnnnnnnnnnnnnnnnnnnnnnnnnnnnnnnnnnnnnnnnnnnnnnnnnnnnnnnnnnnnnnnnnnnnnnnnnnnnnnnnnnnnnnnnnnnnnnnnnnnnnnnnnnnnnnnnnnnnnnnnnnnnnnnnnnnnnnnnnnnnnnnnnnnnnnnnnnnnnnnnnnnnnnnnnnnnnnnnnnnnnnnnnnnnnnnnnnnnnnnnnnnnnnnnnnnnnnnnnnnnnnnnnnnnnnnnnnnnnnnnnnnnnnnnnnnnnnnnnnnnnnnnnnnnnnnnnnnnnnnnnnnnnnnnnnnnnnnnnnnnnnnnnnnnnnnnnnnnnnnnnnnnnnnnnnnnnnnnnnnnnnnnnnnnnnnnnnnnnnnnnnnnnnnnnnnnnnnnnnnnnnnnnnnnnnnnnnnnnnnnnnnnnnnnnnnnnnnnnnnnnnnnnnnnnnnnnnnnnnnnnnnnnnnnnnnnnnnnnnnnnnnnnnnnnnnnnnnnnnnnnnnnnnnnnnnnnnnnnnnnnnnnnnnnnnnnnnnnnnnnnnnnnnnnnnnnnnnnnnnnnnnnnnnnnnnnnnnnnnnnnnnnnnnnnnnnnnnnnnnnnnnnnnnnnnnnnnnnnnnnnnnnnnnnnnnnnnnnnnnnnnnnnnnnnnnnnnnnnnnnnnnnnnnnnnnnnnnnnnnnnnnnnnnnnnnnnnnnnnnnnnnnnnnnnnnnnnnnnnnnnnnnnnnnnnnnnnnnnnnnnnnnnnnnnnnnnnnnnnnnnnnnnnnnnnnnnnnnnnnnnnnnnnnnnnnnnnnnnnnnnnnnnnnnnnnnnnnnnnnnnnnnnnnnnnnnnnnnnnnnnnnnnnnnnnnnnnnnnnnnnnnnnnnnnnnnnnnnnnnnnnnnnnnnnnnnnnnnnnnnnnnnnnnnnnnnnnnnnnnnnnnnnnnnnnnnnnnnnnnnnnnnnnnnnnnnnnnnnnnnnnnnnnnnnnnnnnnnnnnnnnnnnnnnnnnnnnnnnnnnnnnnnnnnnnnnnnnnnnnnnnnnnnnnnnnnnnnnnnnnnnnnnnnnnnnnnnnnnnnnnnnnnnnnnnnnnnnnnnnnnnnnnnnnnnnnnnnnnnnnnnnnnnnnnnnnnnnnnnnnnnnnnnnnnnnnnnnnnnnnnnnnnnnnnnnnnnnnnnnnnnnnnnnnnnnnnnnnnnnnnnnnnnnnnnnnnnnnnnnnnnnnnnnnnnnnnnnnnnnnnnnnnnnnnnnnnnnnnnnnnnnnnnnnnnnnnnnnnnnnnnnnnnnnnnnnnnnnnnnnnnnnnnnnnnnnnnnnnnnnnnnnnnnnnnnnnnnnnnnnnnnnnnnnnnnnnnnnnnnnnnnnnnnnnnnnnnnnnnnnnnnnnnnnnnnnnnnnnnnnnnnnnnnnnnnnnnnnnnnnnnnnnnnnnnnnnnnnnnnnnnnnnnnnnnnnnnnnnnnnnnnnnnnnnnnnnnnnnnnnnnnnnnnnnnnnnnnnnnnnnnnnnnnnnnnnnnnnnnnnnnnnnnnnnnnnnnnnnnnnnnnnnnnnnnnnnnnnnnnnnnnnnnnnnnnnnnnnnnnnnnnnnnnnnnnnnnnnnnnnnnnnnnnnnnnnnnnnnnnnnnnnnnnnnnnnnnnnnnnnnnnnnnnnnnnnnnnnnnnnnnnnnnnnnnnnnnnnnnnnnnnnnnnnnnnnnnnnnnnnnnnnnnnnnnnnnnnnnnnnnnnnnnnnnnnnnnnnnnnnnnnnnnnnnnnnnnnnnnnnnnnnnnnnnnnnnnnnnnnnnnnnnnnnnnnnnnnnnnnnnnnnnnnnnnnnnnnnnnnnnnnnnnnnnnnnnnnnnnnnnnnnnnnnnnnnnnnnnnnnnnnnnnnnnnnnnnnnnnnnnnnnnnnnnnnnnnnnnnnnnnnnnnnnnnnnnnnnnnnnnnnnnnnnnnnnnnnnnnnnnnnnnnnnnnnnnnnnnnnnnnnnnnnnnnnnnnnnnnnnnnnnnnnnnnnnnnnnnnnnnnnnnnnnnnnnnnnnnnnnnnnnnnnnnnnnnnnnnnnnnnnnnnnnnnnnnnnnnnnnnnnnnnnnnnnnnnnnnnnnnnnnnnnnnnnnnnnnnnnnnnnnnnnnnnnnnnnnnnnnnnnnnnnnnnnnnnnnnnnnnnnnnnnnnnnnnnnnnnnnnnnnnnnnnnnnnnnnnnnnnnnnnnnnnnnnnnnnnnnnnnnnnnnnnnnnnnnnnnnnnnnnnnnnnnnnnnnnnnnnnnnnnnnnnnnnnnnnnnnnnnnnnnnnnnnnnnnnnnnnnnnnnnnnnnnnnnnnnnnnnnnnnnnnnnnnnnnnnnnnnnnnnnnnnnnnnnnnnnnnnnnnnnnnnnnnnnnnnnnnnnnnnnnnnnnnnnnnnnnnnnnnnnnnnnnnnnnnnnnnnnnnnnnnnnnnnnnnnnnnnnnnnnnnnnnnnnnnnnnnnnnnnnnnnnnnnnnnnnnnnnnnnnnnnnnnnnnnnnnnnnnnnnnnnnnnnnnnnnnnnnnnnnnnnnnnnnnnnnnnnnnnnnnnnnnnnnnnnnnnnnnnnnnnnnnnnnnnnnnnnnnnnnnnnnnnnnnnnnnnnnnnnnnnnnnnnnnnnnnnnnnnnnnnnnnnnnnnnnnnnnnnnnnnnnnnnnnnnnnnnnnnnnnnnnnnnnnnnnnnnnnnnnnnnnnnnnnnnnnnnnnnnnnnnnnnnnnnnnnnnnnnnnnnnnnnnnnnnnnnnnnnnnnnnnnnnnnnnnnnnnnnnnnnnnnnnnnnnnnnnnnnnnnnnnnnnnnnnnnnnnnnnnnnnnnnnnnnnnnnnnnnnnnnnnnnnnnnnnnnnnnnnnnnnnnnnnnnnnnnnnnnnnnnnnnnnnnnnnnnnnnnnnnnnnnnnnnnnnnnnnnnnnnnnnnnnnnnnnnnnnnnnnnnnnnnnnnnnnnnnnnnnnnnnnnnnnnnnnnnnnnnnnnnnnnnnnnnnnnnnnnnnnnnnnnnnnnnnnnnnnnnnnnnnnnnnnnnnnnnnnnnnnnnnnnnnnnnnnnnnnnnnnnnnnnnnnnnnnnnnnnnnnnnnnnnnnnnnnnnnnnnnnnnnnnnnnnnnnnnnnnnnnnnnnnnnnnnnnnnnnnnnnnnnnnnnnnnnnnnnnnnnnnnnnnnnnnnnnnnnnnnnnnnnnnnnnnnnnnnnnnnnnnnnnnnnnnnnnnnnnnnnnnnnnnnnnnnnnnnnnnnnnnnnnnnnnnnnnnnnnnnnnnnnnnnnnnnnnnnnnnnnnnnnnnnnnnnnnnnnnnnnnnnnnnnnnnnnnnnnnnnnnnnnnnnnnnnnnnnnnnnnnnnnnnnnnnnnnnnnnnnnnnnnnnnnnnnnnnnnnnnnnnnnnnnnnnnnnnnnnnnnnnnnnnnnnnnnnnnnnnnnnnnnnnnnnnnnnnnnnnnnnnnnnnnnnnnnnnnnnnnnnnnnnnnnnnnnnnnnnnnnnnnnnnnnnnnnnnnnnnnnnnnnnnnnnnnnnnnnnnnnnnnnnnnnnnnnnnnnnnnnnnnnnnnnnnnnnnnnnnnnnnnnnnnnnnnnnnnnnnnnnnnnnnnnnnnnnnnnnnnnnnnnnnnnnnnnnnnnnnnnnnnnnnnnnnnnnnnnnnnnnnnnnnnnnnnnnnnnnnnnnnnnnnnnnnnnnnnnnnnnnnnnnnnnnnnnnnnnnnnnnnnnnnnnnnnnnnnnnnnnnnnnnnnnnnnnnnnnnnnnnnnnnnnnnnnnnnnnnnnnnnnnnnnnnnnnnnnnnnnnnnnnnnnnnnnnnnnnnnnnnnnnnnnnnnnnnnnnnnnnnnnnnnnnnnnnnnnnnnnnnnnnnnnnnnnnnnnnnnnnnnnnnnnnnnnnnnnnnnnnnnnnnnnnnnnnnnnnnnnnnnnnnnnnnnnnnnnnnnnnnnnnnnnnnnnnnnnnnnnnnnnnnnnnnnnnnnnnnnnnnnnnnnnnnnnnnnnnnnnnnnnnnnnnnnnnnnnnnnnnnnnnnnnnnnnnnnnnnnnnnnnnnnnnnnnnnnnnnnnnnnnnnnnnnnnnnnnnnnnnnnnnnnnnnnnnnnnnnnnnnnnnnnnnnnnnnnnnnnnnnnnnnnnnnnnnnnnnnnnnnnnnnnnnnnnnnnnnnnnnnnnnnnnnnnnnnnnnnnnnnnnnnnnnnnnnnnnnnnnnnnnnnnnnnnnnnnnnnnnnnnnnnnnnnnnnnnnnnnnnnnnnnnnnnnnnnnnnnnnnnnnnnnnnnnnnnnnnnnnnnnnnnnnnnnnnnnnnnnnnnnnnnnnnnnnnnnnnnnnnnnnnnnnnnnnnnnnnnnnnnnnnnnnnnnnnnnnnnnnnnnnnnnnnnnnnnnnnnnnnnnnnnnnnnnnnnnnnnnnnnnnnnnnnnnnnnnnnnnnnnnnnnnnnnnnnnnnnnnnnnnnnnnnnnnnnnnnnnnnnnnnnnnnnnnnnnnnnnnnnnnnnnnnnnnnnnnnnnnnnnnnnnnnnnnnnnnnnnnnnnnnnnnnnnnnnnnnnnnnnnnnnnnnnnnnnnnnnnnnnnnnnnnnnnnnnnnnnnnnnnnnnnnnnnnnnnnnnnnnnnnnnnnnnnnnnnnnnnnnnnnnnnnnnnnnnnnnnnnnnnnnnnnnnnnnnnnnnnnnnnnnnnnnnnnnnnnnnnnnnnnnnnnnnnnnnnnnnnnnnnnnnnnnnnnnnnnnnnnnnnnnnnnnnnnnnnnnnnnnnnnnnnnnnnnnnnnnnnnnnnnnnnnnnnnnnnnnnnnnnnnnnnnnnnnnnnnnnnnnnnnnnnnnnnnnnnnnnnnnnnnnnnnnnnnnnnnnnnnnnnnnnnnnnnnnnnnnnnnnnnnnnnnnnnnnnnnnnnnnnnnnnnnnnnnnnnnnnnnnnnnnnnnnnnnnnnnnnnnnnnnnnnnnnnnnnnnnnnnnnnnnnnnnnnnnnnnnnnnnnnnnnnnnnnnnnnnnnnnnnnnnnnnnnnnnnnnnnnnnnnnnnnnnnnnnnnnnnnnnnnnnnnnnnnnnnnnnnnnnnnnnnnnnnnnnnnnnnnnnnnnnnnnnnnnnnnnnnnnnnnnnnnnnnnnnnnnnnnnnnnnnnnnnnnnnnnnnnnnnnnnnnnnnnnnnnnnnnnnnnnnnnnnnnnnnnnnnnnnnnnnnnnnnnnnnnnnnnnnnnnnnnnnnnnnnnnnnnnnnnnnnnnnnnnnnnnnnnnnnnnnnnnnnnnnnnnnnnnnnnnnnnnnnnnnnnnnnnnnnnnnnnnnnnnnnnnnnnnnnnnnnnnnnnnnnnnnnnnnnnnnnnnnnnnnnnnnnnnnnnnnnnnnnnnnnnnnnnnnnnnnnnnnnnnnnnnnnnnnnnnnnnnnnnnnnnnnnnnnnnnnnnnnnnnnnnnnnnnnnnnnnnnnnnnnnnnnnnnnnnnnnnnnnnnnnnnnnnnnnnnnnnnnnnnnnnnnnnnnnnnnnnnnnnnnnnnnnnnnnnnnnnnnnnnnnnnnnnnnnnnnnnnnnnnnnnnnnnnnnnnnnnnnnnnnnnnnnnnnnnnnnnnnnnnnnnnnnnnnnnnnnnnnnnnnnnnnnnnnnnnnnnnnnnnnnnnnnnnnnnnnnnnnnnnnnnnnnnnnnnnnnnnnnnnnnnnnnnnnnnnnnnnnnnnnnnnnnnnnnnnnnnnnnnnnnnnnnnnnnnnnnnnnnnnnnnnnnnnnnnnnnnnnnnnnnnnnnnnnnnnnnnnnnnnnnnnnnnnnnnnnnnnnnnnnnnnnnnnnnnnnnnnnnnnnnnnnnnnnnnnnnnnnnnnnnnnnnnnnnnnnnnnnnnnnnnnnnnnnnnnnnnnnnnnnnnnnnnnnnnnnnnnnnnnnnnnnnnnnnnnnnnnnnnnnnnnnnnnnnnnnnnnnnnnnnnnnnnnnnnnnnnnnnnnnnnnnnnnnnnnnnnnnnnnnnnnnnnnnnnnnnnnnnnnnnnnnnnnnnnnnnnnnnnnnnnnnnnnnnnnnnnnnnnnnnnnnnnnnnnnnnnnnnnnnnnnnnnnnnnnnnnnnnnnnnnnnnnnnnnnnnnnnnnnnnnnnnnnnnnnnnnnnnnnnnnnnnnnnnnnnnnnnnnnnnnnnnnnnnnnnnnnnnnnnnnnnnnnnnnnnnnnnnnnnnnnnnnnnnnnnnnnnnnnnnnnnnnnnnnnnnnnnnnnnnnnnnnnnnnnnnnnnnnnnnnnnnnnnnnnnnnnnnnnnnnnnnnnnnnnnnnnnnnnnnnnnnnnnnnnnnnnnnnnnnnnnnnnnnnnnnnnnnnnnnnnnnnnnnnnnnnnnnnnnnnnnnnnnnnnnnnnnnnnnnnnnnnnnnnnnnnnnnnnnnnnnnnnnnnnnnnnnnnnnnnnnnnnnnnnnnnnnnnnnnnnnnnnnnnnnnnnnnnnnnnnnnnnnnnnnnnnnnnnnnnnnnnnnnnnnnnnnnnnnnnnnnnnnnnnnnnnnnnnnnnnnnnnnnnnnnnnnnnnnnnnnnnnnnnnnnnnnnnnnnnnnnnnnnnnnnnnnnnnnnnnnnnnnnnnnnnnnnnnnnnnnnnnnnnnnnnnnnnnnnnnnnnnnnnnnnnnnnnnnnnnnnnnnnnnnnnnnnnnnnnnnnnnnnnnnnnnnnnnnnnnnnnnnnnnnnnnnnnnnnnnnnnnnnnnnnnnnnnnnnnnnnnnnnnnnnnnnnnnnnnnnnnnnnnnnnnnnnnnnnnnnnnnnnnnnnnnnnnnnnnnnnnnnnnnnnnnnnnnnnnnnnnnnnnnnnnnnnnnnnnnnnnnnnnnnnnnnnnnnnnnnnnnnnnnnnnnnnnnnnnnnnnnnnnnnnnnnnnnnnnnnnnnnnnnnnnnnnnnnnnnnnnnnnnnnnnnnnnnnnnnnnnnnnnnnnnnnnnnnnnnnnnnnnnnnnnnnnnnnnnnnnnnnnnnnnnnnnnnnnnnnnnnnnnnnnnnnnnnnnnnnnnnnnnnnnnnnnnnnnnnnnnnnnnnnnnnnnnnnnnnnnnnnnnnnnnnnnnnnnnnnnnnnnnnnnnnnnnnnnnnnnnnnnnnnnnnnnnnnnnnnnnnnnnnnnnnnnnnnnnnnnnnnnnnnnnnnnnnnnnnnnnnnnnnnnnnnnnnnnnnnnnnnnnnnnnnnnnnnnnnnnnnnnnnnnnnnnnnnnnnnnnnnnnnnnnnnnnnnnnnnnnnnnnnnnnnnnnnnnnnnnnnnnnnnnnnnnnnnnnnnnnnnnnnnnnnnnnnnnnnnnnnnnnnnnnnnnnnnnnnnnnnnnnnnnnnnnnnnnnnnnnnnnnnnnnnnnnnnnnnnnnnnnnnnnnnnnnnnnnnnnnnnnnnnnnnnnnnnnnnnnnnnnnnnnnnnnnnnnnnnnnnnnnnnnnnnnnnnnnnnnnnnnnnnnnnnnnnnnnnnnnnnnnnnnnnnnnnnnnnnnnnnnnnnnnnnnnnnnnnnnnnnnnnnnnnnnnnnnnnnnnnnnnnnnnnnnnnnnnnnnnnnnnnnnnnnnnnnnnnnnnnnnnnnnnnnnnnnnnnnnnnnnnnnnnnnnnnnnnnnnnnnnnnnnnnnnnnnnnnnnnnnnnnnnnnnnnnnnnnnnnnnnnnnnnnnnnnnnnnnnnnnnnnnnnnnnnnnnnnnnnnnnnnnnnnnnnnnnnnnnnnnnnnnnnnnnnnnnnnnnnnnnnnnnnnnnnnnnnnnnnnnnnnnnnnnnnnnnnnnnnnnnnnnnnnnnnnnnnnnnnnnnnnnnnnnnnnnnnnnnnnnnnnnnnnnnnnnnnnnnnnnnnnnnnnnnnnnnnnnnnnnnnnnnnnnnnnnnnnnnnnnnnnnnnnnnnnnnnnnnnnnnnnnnnnnnnnnnnnnnnnnnnnnnnnnnnnnnnnnnnnnnnnnnnnnnnnnnnnnnnnnnnnnnnnnnnnnnnnnnnnnnnnnnnnnnnnnnnnnnnnnnnnnnnnnnnnnnnnnnnnnnnnnnnnnnnnnnnnnnnnnnnnnnnnnnnnnnnnnnnnnnnnnnnnnnnnnnnnnnnnnnnnnnnnnnnnnnnnnnnnnnnnnnnnnnnnnnnnnnnnnnnnnnnnnnnnnnnnnnnnnnnnnnnnnnnnnnnnnnnnnnnnnnnnnnnnnnnnnnnnnnnnnnnnnnnnnnnnnnnnnnnnnnnnnnnnnnnnnnnncccgtaatcacctgaatgatttcggtaccgcacagtgaaggtcacgccgacctcactgatgacgcgttcgcgtcacacggtcgcttggcggggcgtcgtcacatcagtcttgacaacatgacagaccgaaggatatgatcgttcatccattttgcccccacttgtcaaagcagtgtggaagcacttcgatgtgatcagtgataaattcaatcgagaggttctggtatgccaaaatggtttcccatacgagatcaccagggcggatgttttcacgaagaaactccactgaaagagatttaaaccggcagatcatttcttgatcattgtagccaagatcgctccattgagtaagctccgaagtctgcatgattgttgagttggtaaccgtaaactgatttgctttatatctcaaagccgcgcggattgctattttatgcttagaagtaatgtactatatcactaatataacaagcagttaacaatgagttttctagtattcgacactgaaaccactgggcttccggaaagcttcaatttgttagtcactccgctgacattaaacaattgggattattgtagaatggttttactagcttggcggatctatagcgtagataataaactattatcaagtaagtgttttctaataaaacccgagggatttaccattccactgttatctgcaatgattcataagattactacagaagaagcattggaaaagagtcacccgcttggcgatgtattagactttcttttcattgatatcaatgtccatgaagttgtggtgtagcgggatcggccagagacgcagcgatcgccggccaagcagtatccggtcgatcgaggacttgcacacgagagaaagatcactagagtaggtccagctgaccaatgtattaatccagtctttgatggaaggtatggatcttggacacgaagctcggacgaagcggagggagggacgtcgcagacggcgggaccggagcgaaggcacttgaggggtagaatgaagattcgaaagtgattgaattgttggagcttacaccctactgttatagacacgcgaccctgcgtcctatcacctagtgcatctaatcaaccatcactcaccggtgttcatccaatcatcctactcgtctaatcatcggtggcgtaaacaacttaccgtaatcaccataatcaacgtgggttcggattggaccggttcgggttaaccggttaatgggtacaactggtacacagtacccaagaccagcaaccctcaatacgccccctcaatgcgaagtcccacgaatgccgagagccaccgtcagatccgtgtggcgtggtcccgcaagcgccttcgtcatgatgtccgctagcatcacagaagtctcgcagtactggagcttgacttcgccgcgcttgacttcatcgcggatgtggtggtacttgatgtcgatgtgcttggcgcgaccgtggttcactgggttcttcgtcatcttgatgcacgactggttgtcttcgcggatcatgagttcgggtccagtctcattagcggccgccagaatctcgcatagcaggcgatgaatccacttgccttcttggatagccagactgagcgcgatgtactccgcttcattgcttcttgcttccccagctcacaggcgcactcatgagcatgaacgtgtagcctgaagtggacttgcggtcggcgaggtcgccggcccagtccgcgtccgagtagccacgaaagtcgatcttgtcgcccggcttgaagcagatcccatgcgtcttggtgccttgcaggtagcgaaagatacgcttgaccgcaacccagtgttcctcttgggggttctccatgaagcgcgatacatagccaacggcgtacgcgatgtctgggcgcgtggcggtcattaggtgcatcagagcaccaacagcttcgcgaaacggagcgttcaccttggtcgccgcgtcgcttggaaccagtcgagtgctcatgtccaccggactcaccacggccttgcactcgtccatggcgaagcgcttcaggatgtcgtccacgtatcgccgctggcacatggtcacgctgccgtccgggccgtccaccaactcgatcccaagaacaaacgcgcacttgccgctgtcggtcatctcgaagcgcgtcttcaggtcggtcttcgtgcgtgcgatcagctcgggcgaactcccggtaatcagtacgtcatccacgtacaccagtacaagcacgcagtgaccgtccaccaccttgatgtagaggcacggatcgaaggccgacacttggaagccgatggagcacacgaactcgtcgaaggtctcgttccacactcgcgaagcttgcttgagaccgtagatggccttcaccagttccaggcagtcgaagtcaccatccagttcgacgccttccggaaccacgcagaagaccacctccttcattatcccgtacaggaatgctgtcaccacgtcgagttggtcgaggggccagccaaaatacttagcaatcgcgatcaccatgcgcagcgtcacatacttgaccacgggcgagaacgtctcggtgtagtcaatgccgaaaaggaagagcacttgagcagtagttggcaaaatgcaaagtgattcgattcaggtccttagttcgcaaccgcgtgctacctctaagcctgctactggatacctcttactggnnnnnnnnnnnnnnnnnnnnnnnnnnnnnnnnnnnnnnnnnnnnnnnnnnnnnnnnnnnnnnnnnnnnnnnnnnnnnnnnnnnnnnnnnnnnnnnnnnnnnnnnnnnnnnnnnnnnnnnnnnnnnnnnnnnnnnnnnnnnnnnnnnnnnnnnnnnnnnnnnnnnnnnnnnnnnnnnnnnnnnnnnnnnnnnnnnnnnnnnnnnnnnnnnnnnnnnnnnnnnnnnnnnnnnnnnnnnnnnnnnnnnnnnnnnnnnnnnnnnnnnnnnnnnnnnnnnnnnnnnnnnnnnnnnnnnnnnnnnnnnnnnnnnnnnnnnnnnnnnnnnnnnnnnnnnnnnnnnnnnnnnnnnnnnnnnnnnnnnnnnnnnnnnnnnnnnnnnnnnnnnnnnnnnnnnnnnnnnnnnnnnnnnnnnnnnnnnnnnnnnnnnnnnnnnnnnnnnnnnnnnnnnnnnnnnnnnnnnnnnnnnnnnnnnnnnnnnnnnnnnnnnnnnnnnnnnnnnnnnnnnnnnnnnnnnnnnnnnnnnnnnnnnnnnnnnnnnnnnnnnnnnnnnnnnnnnnnnnnnnnnnnnnnnnnnnnnnnnnnnnnnnnnnnnnnnnnnnnnnnnnnnnnnnnnnnnnnnnnnnnnnnnnnnnnnnnnnnnnnnnnnnnnnnnnnnnnnnnnnnnnnnnnnnnnnnnnnnnnnnnnnnnnnnnnnnnnnnnnnnnnnnnnnnnnnnnnnnnnnnnnnnnnnnnnnnnnnnnnnnnnnnnnnnnnnnnnnnnnnnnnnnnnnnnnnnnnnnnnnnnnnnnnnnnnnnnnnnnnnnnnnnnnnnnnnnnnnnnnnnnnnnnnnnnnnnnnnnnnnnnnnnnnnnnnnnnnnnnnnnnnnnnnnnnnnnnnnnnnnnnnnnnnnnnnnnnnnnnnnnnnnnnnnnnnnnnnnnnnnnnnnnnnnnnnnnnnnnnnnnnnnnnnnnnnnnnnnnnnnnnnnnnnnnnnnnnnnnnnnnnnnnnnnnnnnnnnnnnnnnnnnnnnnnnnnnnnnnnnnnnnnnnnnnnnnnnnnnnnnnnnnnnnnnnnnnnnnnnnnnnnnnnnnnnnnnnnnnnnnnnnnnnnnnnnnnnnnnnnnnnnnnnnnnnnnnnnnnnnnnnnnnnnnnnnnnnnnnnnnnnnnnnnnnnnnnnnnnnnnnnnnnnnnnnnnnnnnnnnnnnnnnnnnnnnnnnnnnnnnnnnnnnnnnnnnnnnnnnnnnnnnnnnnnnnnnnnnnnnnnnnnnnnnnnnnnnnnnnnnnnnnnnnnnnnnnnnnnnnnnnnnnnnnnnnnnnnnnnnnnnnnnnnnnnnnnnnnnnnnnnnnnnnnnnnnnnnnnnnnnnnnnnnnnnnnnnnnnnnnnnnnnnnnnnnnnnnnnnnnnnnnnnnnnnnnnnnnnnnnnnnnnnnnnnnnnnnnnnnnnnnnnnnnnnnnnnnnnnnnnnnnnnnnnnnnnnnnnnnnnnnnnnnnnnnnnnnnnnnnnnnnnnnnnnnnnnnnnnnnnnnnnnnnnnnnnnnnnnnnnnnnnnnnnnnnnnnnnnnnnnnnnnnnnnnnnnnnnnnnnnnnnnnnnnnnnnnnnnnnnnnnnnnnnnnnnnnnnnnnnnnnnnnnnnnnnnnnnnnnnnnnnnnnnnnnnnnnnnnnnnnnnnnnnnnnnnnnnnnnnnnnnnnnnnnnnnnnnnnnnnnnnnnnnnnnnnnnnnnnnnnnnnnnnnnnnnnnnnnnnnnnnnnnnnnnnnnnnnnnnnnnnnnnnnnnnnnnnnnnnnnnnnnnnnnnnnnnnnnnnnnnnnnnnnnnnnnnnnnnnnnnnnnnnnnnnnnnnnnnnnnnnnnnnnnnnnnnnnnnnnnnnnnnnnnnnnnnnnnnnnnnnnnnnnnnnnnnnnnnnnnnnnnnnnnnnnnnnnnnnnnnnnnnnnnnnnnnnnnnnnnnnnnnnnnnnnnnnnnnnnnnnnnnnnnnnnnnnnnnnnnnnnnnnnnnnnnnnnnnnnnnnnnnnnnnnnnnnnnnnnnnnnnnnnnnnnnnnnnnnnnnnnnnnnnnnnnnnnnnnnnnnnnnnnnnnnnnnnnnnnnnnnnnnnnnnnnnnnnnnnnnnnnnnnnnnnnnnnnnnnnnnnnnnnnnnnnnnnnnnnnnnnnnnnnnnnnnnnnnnnnnnnnnnnnnnnnnnnnnnnnnnnnnnnnnnnnnnnnnnnnnnnnnnnnnnnnnnnnnnnnnnnnnnnnnnnnnnnnnnnnnnnnnnnnnnnnnnnnnnnnnnnnnnnnnnnnnnnnnnnnnnnnnnnnnnnnnnnnnnnnnnnnnnnnnnnnnnnnnnnnnnnnnnnnnnnnnnnnnnnnnnnnnnnnnnnnnnnnnnnnnnnnnnnnnnnnnnnnnnnnnnnnnnnnnnnnnnnnnnnnnnnnnnnnnnnnnnnnnnnnnnnnnnnnnnnnnnnnnnnnnnnnnnnnnnnnnnnnnnnnnnnnnnnnnnnnnnnnnnnnnnnnnnnnnnnnnnnnnnnnnnnnnnnnnnnnnnnnnnnnnnnnnnnnnnnnnnnnnnnnnnnnnnnnnnnnnnnnnnnnnnnnnnnnnnnnnnnnnnnnnnnnnnnnnnnnnnnnnnnnnnnnnnnnnnnnnnnnnnnnnnnnnnnnnnnnnnnnnnnnnnnnnnnnnnnnnnnnnnnnnnnnnnnnnnnnnnnnnnnnnnnnnnnnnnnnnnnnnnnnnnnnnnnnnnnnnnnnnnnnnnnnnnnnnnnnnnnnnnnnnnnnnnnnnnnnnnnnnnnnnnnnnnnnnnnnnnnnnnnnnnnnnnnnnnnnnnnnnnnnnnnnnnnnnnnnnnnnnnnnnnnnnnnnnnnnnnnnnnnnnnnnnnnnnnnnnnnnnnnnnnnnnnnnnnnnnnnnnnnnnnnnnnnnnnnnnnnnnnnnnnnnnnnnnnnnnnnnnnnnnnnnnnnnnnnnnnnnnnnnnnnnnnnnnnnnnnnnnnnnnnnnnnnnnnnnnnnnnnnnnnnnnnnnnnnnnnnnnnnnnnnnnnnnnnnnnnnnnnnnnnnnnnnnnnnnnnnnnnnnnnnnnnnnnnnnnnnnnnnnnnnnnnnnnnnnnnnnnnnnnnnnnnnnnnnnnnnnnnnnnnnnnnnnnnnnnnnnnnnnnnnnnnnnnnnnnnnnnnnnnnnnnnnnnnnnnnnnnnnnnnnnnnnnnnnnnnnnnnnnnnnnnnnnnnnnnnnnnnnnnnnnnnnnnnnnnnnnnnnnnnnnnnnnnnnnnnnnnnnnnnnnnnnnnnnnnnnnnnnnnnnnnnnnnnnnnnnnnnnnnnnnnnnnnnnnnnnnnnnnnnnnnnnnnnnnnnnnnnnnnnnnnnnnnnnnnnnnnnnnnnnnnnnnnnnnnnnnnnnnnnnnnnnnnnnnnnnnnnnnnnnnnnnnnnnnnnnnnnnnnnnnnnnnnnnnnnnnnnnnnnnnnnnnnnnnnnnnnnnnnnnnnnnnnnnnnnnnnnnnnnnnnnnnnnnnnnnnnnnnnnnnnnnnnnnnnnnnnnnnnnnnnnnnnnnnnnnnnnnnnnnnnnnnnnnnnnnnnnnnnnnnnnnnnnnnnnnnnnnnnnnnnnnnnnnnnnnnnnnnnnnnnnnnnnnnnnnnnnnnnnnnnnnnnnnnnnnnnnnnnnnnnnnnnnnnnnnnnnnnnnnnnnnnnnnnnnnnnnnnnnnnnnnnnnnnnnnnnnnnnnnnnnnnnnnnnnnnnnnnnnnnnnnnnnnnnnnnnnnnnnnnnnnnnnnnnnnnnnnnnnnnnnnnnnnnnnnnnnnnnnnnnnnnnnnnnnnnnnnnnnnnnnnnnnnnnnnnnnnnnnnnnnnnnnnnnnnnnnnnnnnnnnnnnnnnnnnnnnnnnnnnnnnnnnnnnnnnnnnnnnnnnnnnnnnnnnnnnnnnnnnnnnnnnnnnnnnnnnnnnnnnnnnnnnnnnnnnnnnnnnnnnnnnnnnnnnnnnnnnnnnnnnnnnnnnnnnnnnnnnnnnnnnnnnnnnnnnnnnnnnnnnnnnnnnnnnnnnnnnnnnnnnnnnnnnnnnnnnnnnnnnnnnnnnnnnnnnnnnnnnnnnnnnnnnnnnnnnnnnnnnnnnnnnnnnnnnnnnnnnnnnnnnnnnnnnnnnnnnnnnnnnnnnnnnnnnnnnnnnnnnnnnnnnnnnnnnnnnnnnnnnnnnnnnnnnnnnnnnnnnnnnnnnnnnnnnnnnnnnnnnnnnnnnnnnnnnnnnnnnnnnnnnnnnnnnnnnnnnnnnnnnnnnnnnnnnnnnnnnnnnnnnnnnnnnnnnnnnnnnnnnnnnnnnnnnnnnnnnnnnnnnnnnnnnnnnnnnnnnnnnnnnnnnnnnnnnnnnnnnnnnnnnnnnnnnnnnnnnnnnnnnnnnnnnnnnnnnnnnnnnnnnnnnnnnnnnnnnnnnnnnnnnnnnnnnnnnnnnnnnnnnnnnnnnnnnnnnnnnnnnnnnnnnnnnnnnnnnnnnnnnnnnnnnnnnnnnnnnnnnnnnnnnnnnnnnnnnnnnnnnnnnnnnnnnnnnnnnnnnnnnnnnnnnnnnnnnnnnnnnnnnnnnnnnnnnnnnnnnnnnnnnnnnnnnnnnnnnnnnnnnnnnnnnnnnnnnnnnnnnnnnnnnnnnnnnnnnnnnnnnnnnnnnnnnnnnnnnnnnnnnnnnnnnnnnnnnnnnnnnnnnnnnnnnnnnnnnnnnnnnnnnnnnnnnnnnnnnnnnnnnnnnnnnnnnnnnnnnnnnnnnnnnnnnnnnnnnnnnnnnnnnnnnnnnnnnnnnnnnnnnnnnnnnnnnnnnnnnnnnnnnnnnnnnnnnnnnnnnnnnnnnnnnnnnnnnnnnnnnnnnnnnnnnnnnnnnnnnnnnnnnnnnnnnnnnnnnnnnnnnnnnnnnnnnnnnnnnnnnnnnnnnnnnnnnnnnnnnnnnnnnnnnnnnnnnnnnnnnnnnnnnnnnnnnnnnnnnnnnnnnnnnnnnnnnnnnnnnnnnnnnnnnnnnnnnnnnnnnnnnnnnnnnnnnnnnnnnnnnnnnnnnnnnnnnnnnnnnnnnnnnnnnnnnnnnnnnnnnnnnnnnnnnnnnnnnnnnnnnnnnnnnnnnnnnnnnnnnnnnnnnnnnnnnnnnnnnnnnnnnnnnnnnnnnnnnnnnnnnnnnnnnnnnnnnnnnnnnnnnnnnnnnnnnnnnnnnnnnnnnnnnnnnnnnnnnnnnnnnnnnnnnnnnnnnnnnnnnnnnnnnnnnnnnnnnnnnnnnnnnnnnnnnnnnnnnnnnnnnnnnnnnnnnnnnnnnnnnnnnnnnnnnnnnnnnnnnnnnnnnnnnnnnnnnnnnnnnnnnnnnnnnnnnnnnnnnnnnnnnnnnnnnnnnnnnnnnnnnnnnnnnnnnnnnnnnnnnnnnnnnnnnnnnnnnnnnnnnnnnnnnnnnnnnnnnnnnnnnnnnnnnnnnnnnnnnnnnnnnnnnnnnnnnnnnnnnnnnnnnnnnnnnnnnnnnnnnnnnnnnnnnnnnnnnnnnnnnnnnnnnnnnnnnnnnnnnnnnnnnnnnnnnnnnnnnnnnnnnnnnnnnnnnnnnnnnnnnnnnnnnnnnnnnnnnnnnnnnnnnnnnnnnnnnnnnnnnnnnnnnnnnnnnnnnnnnnnnnnnnnnnnnnnnnnnnnnnnnnnnnnnnnnnnnnnnnnnnnnnnnnnnnnnnnnnnnnnnnnnnnnnnnnnnnnnnnnnnnnnnnnnnnnnnnnnnnnnnnnnnnnnnnnnnnnnnnnnnnnnnnnnnnnnnnnnnnnnnnnnnnnnnnnnnnnnnnnnnnnnnnnnnnnnnnnnnnnnnnnnnnnnnnnnnnnnnnnnnnnnnnnnnnnnnnnnnnnnnnnnnnnnnnnnnnnnnnnnnnnnnnnnnnnnnnnnnnnnnnnnnnnnnnnnnnnnnnnnnnnnnnnnnnnnnnnnnnnnnnnnnnnnnnnnnnnnnnnnnnnnnnnnnnnnnnnnnnnnnnnnnnnnnnnnnnnnnnnnnnnnnnnnnnnnnnnnnnnnnnnnnnnnnnnnnnnnnnnnnnnnnnnnnnnnnnnnnnnnnnnnnnnnnnnnnnnnnnnnnnnnnnnnnnnnnnnnnnnnnnnnnnnnnnnnnnnnnnnnnnnnnnnnnnnnnnnnnnnnnnnnnnnnnnnnnnnnnnnnnnnnnnnnnnnnnnnnnnnnnnnnnnnnnnnnnnnnnnnnnnnnnnnnnnnnnnnnnnnnnnnnnnnnnnnnnnnnnnnnnnnnnnnnnnnnnnnnnnnnnnnnnnnnnnnnnnnnnnnnnnnnnnnnnnnnnnnnnnnnnnnnnnnnnnnnnnnnnnnnnnnnnnnnnnnnnnnnnnnnnnnnnnnnnnnnnnnnnnnnnnnnnnnnnnnnnnnnnnnnnnnnnnnnnnnnnnnnnnnnnnnnnnnnnnnnnnnnnnnnnnnnnnnnnnnnnnnnnnnnnnnnnnnnnnnnnnnnnnnnnnnnnnnnnnnnnnnnnnnnnnnnnnnnnnnnnnnnnnnnnnnnnnnnnnnnnnnnnnnnnnnnnnnnnnnnnnnnnnnnnnnnnnnnnnnnnnnnnnnnnnnnnnnnnnnnnnnnnnnnnnnnnnnnnnnnnnnnnnnnnnnnnnnnnnnnnnnnnnnnnnnnnnnnnnnnnnnnnnnnnnnnnnnnnnnnnnnnnnnnnnnnnnnnnnnnnnnnnnnnnnnnnnnnnnnnnnnnnnnnnnnnnnnnnnnnnnnnnnnnnnnnnnnnnnnnnnnnnnnnnnnnnnnnnnnnnnnnnnnnnnnnnnnnnnnnnnnnnnnnnnnnnnnnnnnnnnnnnnnnnnnnnnnnnnnnnnnnnnnnnnnnnnnnnnnnnnnnnnnnnnnnnnnnnnnnnnnnnnnnnnnnnnnnnnnnnnnnnnnnnnnnnnnnnnnnnnnnnnnnnnnnnnnnnnnnnnnnnnnnnnnnnnnnnnnnnnnnnnnnnnnnnnnnnnnnnnnnnnnnnnnnnnnnnnnnnnnnnnnnnnnnnnnnnnnnnnnnnnnnnnnnnnnnnnnnnnnnnnnnnnnnnnnnnnnnnnnnnnnnnnnnnnnnnnnnnnnnnnnnnnnnnnnnnnnnnnnnnnnnnnnnnnnnnnnnnnnnnnnnnnnnnnnnnnnnnnnnnnnnnnnnnnnnnnnnnnnnnnnnnnnnnnnnnnnnnnnnnnnnnnnnnnnnnnnnnnnnnnnnnnnnnnnnnnnnnnnnnnnnnnnnnnnnnnnnnnnnnnnnnnnnnnnnnnnnnnnnnnnnnnnnnnnnnnnnnnnnnnnnnnnnnnnnnnnnnnnnnnnnnnnnnnnnnnnnnnnnnnnnnnnnnnnnnnnnnnnnnnnnnnnnnnnnnnnnnnnnnnnnnnnnnnnnnnnnnnnnnnnnnnnnnnnnnnnnnnnnnnnnnnnnnnnnnnnnnnnnnnnnnnnnnnnnnnnnnnnnnnnnnnnnnnnnnnnnnnnnnnnnnnnnnnnnnnnnnnnnnnnnnnnnnnnnnnnnnnnnnnnnnnnnnnnnnnnnnnnnnnnnnnnnnnnnnnnnnnnnnnnnnnnnnnnnnnnnnnnnnnnnnnnnnnnnnnnnnnnnnnnnnnnnnnnnnnnnnnnnnnnnnnnnnnnnnnnnnnnnnnnnnnnnnnnnnnnnnnnnnnnnnnnnnnnnnnnnnnnnnnnnnnnnnnnnnnnnnnnnnnnnnnnnnnnnnnnnnnnnnnnnnnnnnnnnnnnnnnnnnnnnnnnnnnnnnnnnnnnnnnnnnnnnnnnnnnnnnnnnnnnnnnnnnnnnnnnnnnnnnnnnnnnnnnnnnnnnnnnnnnnnnnnnnnnnnnnnnnnnnnnnnnnnnnnnnnnnnnnnnnnnnnnnnnnnnnnnnnnnnnnnnnnnnnnnnnnnnnnnnnnnnnnnnnnnnnnnnnnnnnnnnnnnnnnnnnnnnnnnnnnnnnnnnnnnnnnnnnnnnnnnnnnnnnnnnnnnnnnnnnnnnnnnnnnnnnnnnnnnnnnnnnnnnnnnnnnnnnnnnnnnnnnnnnnnnnnnnnnnnnnnnnnnnnnnnnnnnnnnnnnnnnnnnnnnnnnnnnnnnnnnnnnnnnnnnnnnnnnnnnnnnnnnnnnnnnnnnnnnnnnnnnnnnnnnnnnnnnnnnnnnnnnnnnnnnnnnnnnnnnnnnnnnnnnnnnnnnnnnnnnnnnnnnnnnnnnnnnnnnnnnnnnnnnnnnnnnnnnnnnnnnnnnnnnnnnnnnnnnnnnnnnnnnnnnnnnnnnnnnnnnnnnnnnnnnnnnnnnnnnnnnnnnnnnnnnnnnnnnnnnnnnnnnnnnnnnnnnnnnnnnnnnnnnnnnnnnnnnnnnnnnnnnnnnnnnnnnnnnnnnnnnnnnnnnnnnnnnnnnnnnnnnnnnnnnnnnnnnnnnnnnnnnnnnnnnnnnnnnnnnnnnnnnnnnnnnnnnnnnnnnnnnnnnnnnnnnnnnnnnnnnnnnnnnnnnnnnnnnnnnnnnnnnnnnnnnnnnnnnnnnnnnnnnnnnnnnnnnnnnnnnnnnnnnnnnnnnnnnnnnnnnnnnnnnnnnnnnnnnnnnnnnnnnnnnnnnnnnnnnnnnnnnnnnnnnnnnnnnnnnnnnnnnnnnnnnnnnnnnnnnnnnnnnnnnnnnnnnnnnnnnnnnnnnnnnnnnnnnnnnnnnnnnnnnnnnnnnnnnnnnnnnnnnnnnnnnnnnnnnnnnnnnnnnnnnnnnnnnnnnnnnnnnnnnnnnnnnnnnnnnnnnnnnnnnnnnnnnnnnnnnnnnnnnnnnnnnnnnnnnnnnnnnnnnnnnnnnnnnnnnnnnnnnnnnnnnnnnnnnnnnnnnnnnnnnnnnnnnnnnnnnnnnnnnnnnnnnnnnnnnnnnnnnnnnnnnnnnnnnnnnnnnnnnnnnnnnnnnnnnnnnnnnnnnnnnnnnnnnnnnnnnnnnnnnnnnnnnnnnnnnnnnnnnnnnnnnnnnnnnnnnnnnnnnnnnnnnnnnnnnnnnnnnnnnnnnnnnnnnnnnnnnnnnnnnnnnnnnnnnnnnnnnnnnnnnnnnnnnnnnnnnnnnnnnnnnnnnnnnnnnnnnnnnnnnnnnnnnnnnnnnnnnnnnnnnnnnnnnnnnnnnnnnnnnnnnnnnnnnnnnnnnnnnnnnnnnnnnnnnnnnnnnnnnnnnnnnnnnnnnnnnnnnnnnnnnnnnnnnnnnnnnnnnnnnnnnnnnnnnnnnnnnnnnnnnnnnnnnnnnnnnnnnnnnnnnnnnnnnnnnnnnnnnnnnnnnnnnnnnnnnnnnnnnnnnnnnnnnnnnnnnnnnnnnnnnnnnnnnnnnnnnnnnnnnnnnnnnnnnnnnnnnnnnnnnnnnnnnnnnnnnnnnnnnnnnnnnnnnnnnnnnnnnnnnnnnnnnnnnnnnnnnnnnnnnnnnnnnnnnnnnnnnnnnnnnnnnnnnnnnnnnnnnnnnnnnnnnnnnnnnnnnnnnnnnnnnnnnnnnnnnnnnnnnnnnnnnnnnnnnnnnnnnnnnnnnnnnnnnnnnnnnnnnnnnnnnnnnnnnnnnnnnnnnnnnnnnnnnnnnnnnnnnnnnnnnnnnnnnnnnnnnnnnnnnnnnnnnnnnnnnnnnnnnnnnnnnnnnnnnnnnnnnnnnnnnnnnnnnnnnnnnnnnnnnnnnnnnnnnnnnnnnnnnnnnnnnnnnnnnnnnnnnnnnnnnnnnnnnnnnnnnnnnnnnnnnnnnnnnnnnnnnnnnnnnnnnnnnnnnnnnnnnnnnnnnnnnnnnnnnnnnnnnnnnnnnnnnnnnnnnnnnnnnnnnnnnnnnnnnnnnnnnnnnnnnnnnnnnnnnnnnnnnnnnnnnnnnnnnnnnnnnnnnnnnnnnnnnnnnnnnnnnnnnnnnnnnnnnnnnnnnnnnnnnnnnnnnnnnnnnnnnnnnnnnnnnnnnnnnnnnnnnnnnnnnnnnnnnnnnnnnnnnnnnnnnnnnnnnnnnnnnnnnnnnnnnnnnnnnnnnnnnnnnnnnnnnnnnnnnnnnnnnnnnnnnnnnnnnnnnnnnnnnnnnnnnnnnnnnnnnnnnnnnnnnnnnnnnnnnnnnnnnnnnnnnnnnnnnnnnnnnnnnnnnnnnnnnnnnnnnnnnnnnnnnnnnnnnnnnnnnnnnnnnnnnnnnnnnnnnnnnnnnnnnnnnnnnnnnnnnnnnnnnnnnnnnnnnnnnnnnnnnnnnnnnnnnnnnnnnnnnnnnnnnnnnnnnnnnnnnnnnnnnnnnnnnnnnnnnnnnnnnnnnnnnnnnnnnnnnnnnnnnnnnnnnnnnnnnnnnnnnnnnnnnnnnnnnnnnnnnnnnnnnnnnnnnnnnnnnnnnnnnnnnnnnnnnnnnnnnnnnnnnnnnnnnnnnnnnnnnnnnnnnnnnnnnnnnnnnnnnnnnnnnnnnnnnnnnnnnnnnnnnnnnnnnnnnnnnnnnnnnnnnnnnnnnnnnnnnnnnnnnnnnnnnnnnnnnnnnnnnnnnnnnnnnnnnnnnnnnnnnnnnnnnnnnnnnnnnnnnnnnnnnnnnnnnnnnnnnnnnnnnnnnnnnnnnnnnnnnnnnnnnnnnnnnnnnnnnnnnnnnnnnnnnnnnnnnnnnnnnnnnnnnnnnnnnnnnnnnnnnnnnnnnnnnnnnnnnnnnnnnnnnnnnnnnnnnnnnnnnnnnnnnnnnnnnnnnnnnnnnnnnnnnnnnnnnnnnnnnnnnnnnnnnnnnnnnnnnnnnnnnnnnnnnnnnnnnnnnnnnnnnnnnnnnnnnnnnnnnnnnnnnnnnnnnnnnnnnnnnnnnnnnnnnnnnnnnnnnnnnnnnnnnnnnnnnnnnnnnnnnnnnnnnnnnnnnnnnnnnnnnnnnnnnnnnnnnnnnnnnnnnnnnnnnnnnnnnnnnnnnnnnnnnnnnnnnnnnnnnnnnnnnnnnnnnnnnnnnnnnnnnnnnnnnnnnnnnnnnnnnnnnnnnnnnnnnnnnnnnnnnnnnnnnnnnnnnnnnnnnnnnnnnnnnnnnnnnnnnnnnnnnnnnnnnnnnnnnnnnnnnnnnnnnnnnnnnnnnnnnnnnnnnnnnnnnnnnnnnnnnnnnnnnnnnnnnnnnnnnnnnnnnnnnnnnnnnnnnnnnnnnnnnnnnnnnnnnnnnnnnnnnnnnnnnnnnnnnnnnnnnnnnnnnnnnnnnnnnnnnnnnnnnnnnnnnnnnnnnnnnnnnnnnnnnnnnnnnnnnnnnnnnnnnnnnnnnnnnnnnnnnnnnnnnnnnnnnnnnnnnnnnnnnnnnnnnnnnnnnnnnnnnnnnnnnnnnnnnnnnnnnnnnnnnnnnnnnnnnnnnnnnnnnnnnnnnnnnnnnnnnnnnnnnnnnnnnnnnnnnnnnnnnnnnnnnnnnnnnnnnnnnnnnnnnnnnnnnnnnnnnnnnnnnnnnnnnnnnnnnnnnnnnnnnnnnnnnnnnnnnnnnnnnnnnnnnnnnnnnnnnnnnnnnnnnnnnnnnnnnnnnnnnnnnnnnnnnnnnnnnnnnnnnnnnnnnnnnnnnnnnnnnnnnnnnnnnnnnnnnnnnnnnnnnnnnnnnnnnnnnnnnnnnnnnnnnnnnnnnnnnnnnnnnnnnnnnnnnnnnnnnnnnnnnnnnnnnnnnnnnnnnnnnnnnnnnnnnnnnnnnnnnnnnnnnnnnnnnnnnnnnnnnnnnnnnnnnnnnnnnnnnnnnnnnnnnnnnnnnnnnnnnnnnnnnnnnnnnnnnnnnnnnnnnnnnnnnnnnnnnnnnnnnnnnnnnnnnnnnnnnnnnnnnnnnnnnnnnnnnnnnnnnnnnnnnnnnnnnnnnnnnnnnnnnnnnnnnnnnnnnnnnnnnnnnnnnnnnnnnnnnnnnnnnnnnnnnnnnnnnnnnnnnnnnnnnnnnnnnnnnnnnnnnnnnnnnnnnnnnnnnnnnnnnnnnnnnnnnnnnnnnnnnnnnnnnnnnnnnnnnnnnnnnnnnnnnnnnnnnnnnnnnnnnnnnnnnnnnnnnnnnnnnnnnnnnnnnnnnnnnnnnnnnnnnnnnnnnnnnnnnnnnnnnnnnnnnnnnnnnnnnnnnnnnnnnnnnnnnnnnnnnnnnnnnnnnnnnnnnnnnnnnnnnnnnnnnnnnnnnnnnnnnnnnnnnnnnnnnnnnnnnnnnnnnnnnnnnnnnnnnnnnnnnnnnnnnnnnnnnnnnnnnnnnnnnnnnnnnnnnnnnnnnnnnnnnnnnnnnnnnnnnnnnnnnnnnnnnnnnnnnnnnnnnnnnnnnnnnnnnnnnnnnnnnnnnnnnnnnnnnnnnnnnnnnnnnnnnnnnnnnnnnnnnnnnnnnnnnnnnnnnnnnnnnnnnnnnnnnnnnnnnnnnnnnnnnnnnnnnnnnnnnnnnnnnnnnnnnnnnnnnnnnnnnnnnnnnnnnnnnnnnnnnnnnnnnnnnnnnnnnnnnnnnnnnnnnnnnnnnnnnnnnnnnnnnnnnnnnnnnnnnnnnnnnnnnnnnnnnnnnnnnnnnnnnnnnnnnnnnnnnnnnnnnnnnnnnnnnnnnnnnnnnnnnnnnnnnnnnnnnnnnnnnnnnnnnnnnnnnnnnnnnnnnnnnnnnnnnnnnnnnnnnnnnnnnnnnnnnnnnnnnnnnnnnnnnnnnnnnnnnnnnnnnnnnnnnnnnnnnnnnnnnnnnnnnnnnnnnnnnnnnnnnnnnnnnnnnnnnnnnnnnnnnnnnnnnnnnnnnnnnnnnnnnnnnnnnnnnnnnnnnnnnnnnnnnnnnnnnnnnnnnnnnnnnnnnnnnnnnnnnnnnnnnnnnnnnnnnnnnnnnnnnnnnnnnnnnnnnnnnnnnnnnnnnnnnnnnnnnnnnnnnnnnnnnnnnnnnnnnnnnnnnnnnnnnnnnnnnnnnnnnnnnnnnnnnnnnnnnnnnnnnnnnnnnnnnnnnnnnnnnnnnnnnnnnnnnnnnnnnnnnnnnnnnnnnnnnnnnnnnnnnnnnnnnnnnnnnnnnnnnnnnnnnnnnnnnnnnnnnnnnnnnnnnnnnnnnnnnnnnnnnnnnnnnnnnnnnnnnnnnnnnnnnnnnnnnnnnnnnnnnnnnnnnnnnnnnnnnnnnnnnnnnnnnnnnnnnnnnnnnnnnnnnnnnnnnnnnnnnnnnnnnnnnnnnnnnnnnnnnnnnnnnnnnnnnnnnnnnnnnnnnnnnnnnnnnnnnnnnnnnnnnnnnnnnnnnnnnnnnnnnnnnnnnnnnnnnnnnnnnnnnnnnnnnnnnnnnnnnnnnnnnnnnnnnnnnnnnnnnnnnnnnnnnnnnnnnnnnnnnnnnnnnnnnnnnnnnnnnnnnnnnnnnnnnnnnnnnnnnnnnnnnnnnnnnnnnnnnnnnnnnnnnnnnnnnnnnnnnnnnnnnnnnnnnnnnnnnnnnnnnnnnnnnnnnnnnnnnnnnnnnnnnnnnnnnnnnnnnnnnnnnnnnnnnnnnnnnnnnnnnnnnnnnnnnnnnnnnnnnnnnnnnnnnnnnnnnnnnnnnnnnnnnnnnnnnnnnnnnnnnnnnnnnnnnnnnnnnnnnnnnnnnnnnnnnnnnnnnnnnnnnnnnnnnnnnnnnnnnnnnnnnnnnnnnnnnnnnnnnnnnnnnnnnnnnnnnnnnnnnnnnnnnnnnnnnnnnnnnnnnnnnnnnnnnnnnnnnnnnnnnnnnnnnnnnnnnnnnnnnnnnnnnnnnnnnnnnnnnnnnnnnnnnnnnnnnnnnnnnnnnnnnnnnnnnnnnnnnnnnnnnnnnnnnnnnnnnnnnnnnnnnnnnnnnnnnnnnnnnnnnnnnnnnnnnnnnnnnnnnnnnnnnnnnnnnnnnnnnnnnnnnnnnnnnnnnnnnnnnnnnnnnnnnnnnnnnnnnnnnnnnnnnnnnnnnnnnnnnnnnnnnnnnnnnnnnnnnnnnnnnnnnnnnnnnnnnnnnnnnnnnnnnnnnnnnnnnnnnnnnnnnnnnnnnnnnnnnnnnnnnnnnnnnnnnnnnnnnnnnnnnnnnnnnnnnnnnnnnnnnnnnnnnnnnnnnnnnnnnnnnnnnnnnnnnnnnnnnnnnnnnnnnnnnnnnnnnnnnnnnnnnnnnnnnnnnnnnnnnnnnnnnnnnnnnnnnnnnnnnnnnnnnnnnnnnnnnnnnnnnnnnnnnnnnnnnnnnnnnnnnnnnnnnnnnnnnnnnnnnnnnnnnnnnnnnnnnnnnnnnnnnnnnnnnnnnnnnnnnnnnnnnnnnnnnnnnnnnnnnnnnnnnnnnnnnnnnnnnnnnnnnnnnnnnnnnnnnnnnnnnnnnnnnnnnnnnnnnnnnnnnnnnnnnnnnnnnnnnnnnnnnnnnnnnnnnnnnnnnnnnnnnnnnnnnnnnnnnnnnnnnnnnnnnnnnnnnnnnnnnnnnnnnnnnnnnnnnnnnnnnnnnnnnnnnnnnnnnnnnnnnnnnnnnnnnnnnnnnnnnnnnnnnnnnnnnnnnnnnnnnnnnnnnnnnnnnnnnnnnnnnnnnnnnnnnnnnnnnnnnnnnnnnnnnnnnnnnnnnnnnnnnnnnnnnnnnnnnnnnnnnnnnnnnnnnnnnnnnnnnnnnnnnnnnnnnnnnnnnnnnnnnnnnnnnnnnnnnnnnnnnnnnnnnnnnnnnnnnnnnnnnnnnnnnnnnnnnnnnnnnnnnnnnnnnnnnnnnnnnnnnnnnnnnnnnnnnnnnnnnnnnnnnnnnnnnnnnnnnnnnnnnnnnnnnnnnnnnnnnnnnnnnnnnnnnnnnnnnnnnnnnnnnnnnnnnnnnnnnnnnnnnnnnnnnnnnnnnnnnnnnnnnnnnnnnnnnnnnnnnnnnnnnnnnnnnnnnnnnnnnnnnnnnnnnnnnnnnnnnnnnnnnnnnnnnnnnnnnnnnnnnnnnnnnnnnnnnnnnnnnnnnnnnnnnnnnnnnnnnnnnnnnnnnnnnnnnnnnnnnnnnnnnnnnnnnnnnnnnnnnnnnnnnnnnnnnnnnnnnnnnnnnnnnnnnnnnnnnnnnnnnnnnnnnnnnnnnnnnnnnnnnnnnnnnnnnnnnnnnnnnnnnnnnnnnnnnnnnnnnnnnnnnnnnnnnnnnnnnnnnnnnnnnnnnnnnnnnnnnnnnnnnnnnnnnnnnnnnnnnnnnnnnnnnnnnnnnnnnnnnnnnnnnnnnnnnnnnnnnnnnnnnnnnnnnnnnnnnnnnnnnnnnnnnnnnnnnnnnnnnnnnnnnnnnnnnnnnnnnnnnnnnnnnnnnnnnnnnnnnnnnnnnnnnnnnnnnnnnnnnnnnnnnnnnnnnnnnnnnnnnnnnnnnnnnnnnnnnnnnnnnnnnnnnnnnnnnnnnnnnnnnnnnnnnnnnnnnnnnnnnnnnnnnnnnnnnnnnnnnnnnnnnnnnnnnnnnnnnnnnnnnnnnnnnnnnnnnnnnnnnnnnnnnnnnnnnnnnnnnnnnnnnnnnnnnnnnnnnnnnnnnnnnnnnnnnnnnnnnnnnnnnnnnnnnnnnnnnnnnnnnnnnnnnnnnnnnnnnnnnnnnnnnnnnnnnnnnnnnnnnnnnnnnnnnnnnnnnnnnnnnnnnnnnnnnnnnnnnnnnnnnnnnnnnnnnnnnnnnnnnnnnnnnnnnnnnnnnnnnnnnnnnnnnnnnnnnnnnnnnnnnnnnnnnnnnnnnnnnnnnnnnnnnnnnnnnnnnnnnnnnnnnnnnnnnnnnnnnnnnnnnnnnnnnnnnnnnnnnnnnnnnnnnnnnnnnnnnnnnnnnnnnnnnnnnnnnnnnnnnnnnnnnnnnnnnnnnnnnnnnnnnnnnnnnnnnnnnnnnnnnnnnnnnnnnnnnnnnnnnnnnnnnnnnnnnnnnnnnnnnnnnnnnnnnnnnnnnnnnnnnnnnnnnnnnnnnnnnnnnnnnnnnnnnnnnnnnnnnnnnnnnnnnnnnnnnnnnnnnnnnnnnnnnnnnnnnnnnnnnnnnnnnnnnnnnnnnnnnnnnnnnnnnnnnnnnnnnnnnnnnnnnnnnnnnnnnnnnnnnnnnnnnnnnnnnnnnnnnnnnnnnnnnnnnnnnnnnnnnnnnnnnnnnnnnnnnnnnnnnnnnnnnnnnnnnnnnnnnnnnnnnnnnnnnnnnnnnnnnnnnnnnnnnnnnnnnnnnnnnnnnnnnnnnnnnnnnnnnnnnnnnnnnnnnnnnnnnnnnnnnnnnnnnnnnnnnnnnnnnnnnnnnnnnnnnnnnnnnnnnnnnnnnnnnnnnnnnnnnnnnnnnnnnnnnnnnnnnnnnnnnnnnnnnnnnnnnnnnnnnnnnnnnnnnnnnnnnnnnnnnnnnnnnnnnnnnnnnnnnnnnnnnnnnnnnnnnnnnnnnnnnnnnnnnnnnnnnnnnnnnnnnnnnnnnnnnnnnnnnnnnnnnnnnnnnnnnnnnnnnnnnnnnnnnnnnnnnnnnnnnnnnnnnnnnnnnnnnnnnnnnnnnnnnnnnnnnnnnnnnnnnnnnnnnnnnnnnnnnnnnnnnnnnnnnnnnnnnnnnnnnnnnnnnnnnnnnnnnnnnnnnnnnnnnnnnnnnnnnnnnnnnnnnnnnnnnnnnnnnnnnnnnnnnnnnnnnnnnnnnnnnnnnnnnnnnnnnnnnnnnnnnnnnnnnnnnnnnnnnnnnnnnnnnnnnnnnnnnnnnnnnnnnnnnnnnnnnnnnnnnnnnnnnnnnnnnnnnnnnnnnnnnnnnnnnnnnnnnnnnnnnnnnnnnnnnnnnnnnnnnnnnnnnnnnnnnnnnnnnnnnnnnnnnnnnnnnnnnnnnnnnnnnnnnnnnnnnnnnnnnnnnnnnnnnnnnnnnnnnnnnnnnnnnnnnnnnnnnnnnnnnnnnnnnnnnnnnnnnnnnnnnnnnnnnnnnnnnnnnnnnnnnnnnnnnnnnnnnnnnnnnnnnnnnnnnnnnnnnnnnnnnnnnnnnnnnnnnnnnnnnnnnnnnnnnnnnnnnnnnnnnnnnnnnnnnnnnnnnnnnnnnnnnnnnnnnnnnnnnnnnnnnnnnnnnnnnnnnnnnnnnnnnnnnnnnnnnnnnnnnnnnnnnnnnnnnnnnnnnnnnnnnnnnnnnnnnnnnnnnnnnnnnnnnnnnnnnnnnnnnnnnnnnnnnnnnnnnnnnnnnnnnnnnnnnnnnnnnnnnnnnnnnnnnnnnnnnnnnnnnnnnnnnnnnnnnnnnnnnnnnnnnnnnnnnnnnnnnnnnnnnnnnnnnnnnnnnnnnnnnnnnnnnnnnnnnnnnnnnnnnnnnnnnnnnnnnnnnnnnnnnnnnnnnnnnnnnnnnnnnnnnnnnnnnnnnnnnnnnnnnnnnnnnnnnnnnnnnnnnnnnnnnnnnnnnnnnnnnnnnnnnnnnnnnnnnnnnnnnnnnnnnnnnnnnnnnnnnnnnnnnnnnnnnnnnnnnnnnnnnnnnnnnnnnnnnnnnnnnnnnnnnnnnnnnnnnnnnnnnnnnnnnnnnnnnnnnnnnnnnnnnnnnnnnnnnnnnnnnnnnnnnnnnnnnnnnnnnnnnnnnnnnnnnnnnnnnnnnnnnnnnnnnnnnnnnnnnnnnnnnnnnnnnnnnnnnnnnnnnnnnnnnnnnnnnnnnnnnnnnnnnnnnnnnnnnnnnnnnnnnnnnnnnnnnnnnnnnnnnnnnnnnnnnnnnnnnnnnnnnnnnnnnnnnnnnnnnnnnnnnnnnnnnnnnnnnnnnnnnnnnnnnnnnnnnnnnnnnnnnnnnnnnnnnnnnnnnnnnnnnnnnnnnnnnnnnnnnnnnnnnnnnnnnnnnnnnnnnnnnnnnnnnnnnnnnnnnnnnnnnnnnnnnnnnnnnnnnnnnnnnnnnnnnnnnnnnnnnnnnnnnnnnnnnnnnnnnnnnnnnnnnnnnnnnnnnnnnnnnnnnnnnnnnnnnnnnnnnnnnnnnnnnnnnnnnnnnnnnnnnnnnnnnnnnnnnnnnnnnnnnnnnnnnnnnnnnnnnnnnnnnnnnnnnnnnnnnnnnnnnnnnnnnnnnnnnnnnnnnnnnnnnnnnnnnnnnnnnnnnnnnnnnnnnnnnnnnnnnnnnnnnnnnnnnnnnnnnnnnnnnnnnnnnnnnnnnnnnnnnnnnnnnnnnnnnnnnnnnnnnnnnnnnnnnnnnnnnnnnnnnnnnnnnnnnnnnnnnnnnnnnnnnnnnnnnnnnnnnnnnnnnnnnnnnnnnnnnnnnnnnnnnnnnnnnnnnnnnnnnnnnnnnnnnnnnnnnnnnnnnnnnnnnnnnnnnnnnnnnnnnnnnnnnnnnnnnnnnnnnnnnnnnnnnnnnnnnnnnnnnnnnnnnnnnnnnnnnnnnnnnnnnnnnnnnnnnnnnnnnnnnnnnnnnnnnnnnnnnnnnnnnnnnnnnnnnnnnnnnnnnnnnnnnnnnnnnnnnnnnnnnnnnnnnnnnnnnnnnnnnnnnnnnnnnnnnnnnnnnnnnnnnnnnnnnnnnnnnnnnnnnnnnnnnnnnnnnnnnnnnnnnnnnnnnnnnnnnnnnnnnnnnnnnnnnnnnnnnnnnnnnnnnnnnnnnnnnnnnnnnnnnnnnnnnnnnnnnnnnnnnnnnnnnnnnnnnnnnnnnnnnnnnnnnnnnnnnnnnnnnnnnnnnnnnnnnnnnnnnnnnnnnnnnnnnnnnnnnnnnnnnnnnnnnnnnnnnnnnnnnnnnnnnnnnnnnnnnnnnnnnnnnnnnnnnnnnnnnnnnnnnnnnnnnnnnnnnnnnnnnnnnnnnnnnnnnnnnnnnnnnnnnnnnnnnnnnnnnnnnnnnnnnnnnnnnnnnnnnnnnnnnnnnnnnnnnnnnnnnnnnnnnnnnnnnnnnnnnnnnnnnnnnnnnnnnnnnnnnnnnnnnnnnnnnnnnnnnnnnnnnnnnnnnnnnnnnnnnnnnnnnnnnnnnnnnnnnnnnnnnnnnnnnnnnnnnnnnnnnnnnnnnnnnnnnnnnnnnnnnnnnnnnnnnnnnnnnnnnnnnnnnnnnnnnnnnnnnnnnnnnnnnnnnnnnnnnnnnnnnnnnnnnnnnnnnnnnnnnnnnnnnnnnnnnnnnnnnnnnnnnnnnnnnnnnnnnnnnnnnnnnnnnnnnnnnnnnnnnnnnnnnnnnnnnnnnnnnnnnnnnnnnnnnnnnnnnnnnnnnnnnnnnnnnnnnnnnnnnnnnnnnnnnnnnnnnnnnnnnnnnnnnnnnnnnnnnnnnnnnnnnnnnnnnnnnnnnnnnnnnnnnnnnnnnnnnnnnnnnnnnnnnnnnnnnnnnnnnnnnnnnnnnnnnnnnnnnnnnnnnnnnnnnnnnnnnnnnnnnnnnnnnnnnnnnnnnnnnnnnnnnnnnnnnnnnnnnnnnnnnnnnnnnnnnnnnnnnnnnnnnnnnnnnnnnnnnnnnnnnnnnnnnnnnnnnnnnnnnnnnnnnnnnnnnnnnnnnnnnnnnnnnnnnnnnnnnnnnnnnnnnnnnnnnnnnnnnnnnnnnnnnnnnnnnnnnnnnnnnnnnnnnnnnnnnnnnnnnnnnnnnnnnnnnnnnnnnnnnnnnnnnnnnnnnnnnnnnnnnnnnnnnnnnnnnnnnnnnnnnnnnnnnnnnnnnnnnnnnnnnnnnnnnnnnnnnnnnnnnnnnnnnnnnnnnnnnnnnnnnnnnnnnnnnnnnnnnnnnnnnnnnnnnnnnnnnnnnnnnnnnnnnnnnnnnnnnnnnnnnnnnnnnnnnnnnnnnnnnnnnnnnnnnnnnnnnnnnnnnnnnnnnnnnnnnnnnnnnnnnnnnnnnnnnnnnnnnnnnnnnnnnnnnnnnnnnnnnnnnnnnnnnnnnnnnnnnnnnnnnnnnnnnnnnnnnnnnnnnnnnnnnnnnnnnnnnnnnnnnnnnnnnnnnnnnnnnnnnnnnnnnnnnnnnnnnnnnnnnnnnnnnnnnnnnnnnnnnnnnnnnnnnnnnnnnnnnnnnnnnnnnnnnnnnnnnnnnnnnnnnnnnnnnnnnnnnnnnnnnnnnnnnnnnnnnnnnnnnnnnnnnnnnnnnnnnnnnnnnnnnnnnnnnnnnnnnnnnnnnnnnnnnnnnnnnnnnnnnnnnnnnnnnnnnnnnnnnnnnnnnnnnnnnnnnnnnnnnnnnnnnnnnnnnnnnnnnnnnnnnnnnnnnnnnnnnnnnnnnnnnnnnnnnnnnnnnnnnnnnnnnnnnnnnnnnnnnnnnnnnnnnnnnnnnnnnnnnnnnnnnnnnnnnnnnnnnnnnnnnnnnnnnnnnnnnnnnnnnnnnnnnnnnnnnnnnnnnnnnnnnnnnnnnnnnnnnnnnnnnnnnnnnnnnnnnnnnnnnnnnnnnnnnnnnnnnnnnnnnnnnnnnnnnnnnnnnnnnnnnnnnnnnnnnnnnnnnnnnnnnnnnnnnnnnnnnnnnnnnnnnnnnnnnnnnnnnnnnnnnnnnnnnnnnnnnnnnnnnnnnnnnnnnnnnnnnnnnnnnnnnnnnnnnnnnnnnnnnnnnnnnnnnnnnnnnnnnnnnnnnnnnnnnnnnnnnnnnnnnnnnnnnnnnnnnnnnnnnnnnnnnnnnnnnnnnnnnnnnnnnnnnnnnnnnnnnnnnnnnnnnnnnnnnnnnnnnnnnnnnnnnnnnnnnnnnnnnnnnnnnnnnnnnnnnnnnnnnnnnnnnnnnnnnnnnnnnnnnnnnnnnnnnnnnnnnnnnnnnnnnnnnnnnnnnnnnnnnnnnnnnnnnnnnnnnnnnnnnnnnnnnnnnnnnnnnnnnnnnnnnnnnnnnnnnnnnnnnnnnnnnnnnnnnnnnnnnnnnnnnnnnnnnnnnnnnnnnnnnnnnnnnnnnnnnnnnnnnnnnnnnnnnnnnnnnnnnnnnnnnnnnnnnnnnnnnnnnnnnnnnnnnnnnnnnnnnnnnnnnnnnnnnnnnnnnnnnnnnnnnnnnnnnnnnnnnnnnnnnnnnnnnnnnnnnnnnnnnnnnnnnnnnnnnnnnnnnnnnnnnnnnnnnnnnnnnnnnnnnnnnnnnnnnnnnnnnnnnnnnnnnnnnnnnnnnnnnnnnnnnnnnnnnnnnnnnnnnnnnnnnnnnnnnnnnnnnnnnnnnnnnnnnnnnnnnnnnnnnnnnnnnnnnnnnnnnnnnnnnnnnnnnnnnnnnnnnnnnnnnnnnnnnnnnnnnnnnnnnnnnnnnnnnnnnnnnnnnnnnnnnnnnnnnnnnnnnnnnnnnnnnnnnnnnnnnnnnnnnnnnnnnnnnnnnnnnnnnnnnnnnnnnnnnnnnnnnnnnnnnnnnnnnnnnnnnnnnnnnnnnnnnnnnnnnnnnnnnnnnnnnnnnnnnnnnnnnnnnnnnnnnnnnnnnnnnnnnnnnnnnnnnnnnnnnnnnnnnnnnnnnnnnnnnnnnnnnnnnnnnnnnnnnnnnnnnnnnnnnnnnnnnnnnnnnnnnnnnnnnnnnnnnnnnnnnnnnnnnnnnnnnnnnnnnnnnnnnnnnnnnnnnnnnnnnnnnnnnnnnnnnnnnnnnnnnnnnnnnnnnnnnnnnnnnnnnnnnnnnnnnnnnnnnnnnnnnnnnnnnnnnnnnnnnnnnnnnnnnnnnnnnnnnnnnnnnnnnnnnnnnnnnnnnnnnnnnnnnnnnnnnnnnnnnnnnnnnnnnnnnnnnnnnnnnnnnnnnnnnnnnnnnnnnnnnnnnnnnnnnnnnnnnnnnnnnnnnnnnnnnnnnnnnnnnnnnnnnnnnnnnnnnnnnnnnnnnnnnnnnnnnnnnnnnnnnnnnnnnnnnnnnnnnnnnnnnnnnnnnnnnnnnnnnnnnnnnnnnnnnnnnnnnnnnnnnnnnnnnnnnnnnnnnnnnnnnnnnnnnnnnnnnnnnnnnnnnnnnnnnnnnnnnnnnnnnnnnnnnnnnnnnnnnnnnnnnnnnnnnnnnnnnnnnnnnnnnnnnnnnnnnnnnnnnnnnnnnnnnnnnnnnnnnnnnnnnnnnnnnnnnnnnnnnnnnnnnnnnnnnnnnnnnnnnnnnnnnnnnnnnnnnnnnnnnnnnnnnnnnnnnnnnnnnnnnnnnnnnnnnnnnnnnnnnnnnnnnnnnnnnnnnnnnnnnnnnnnnnnnnnnnnnnnnnnnnnnnnnnnnnnnnnnnnnnnnnnnnnnnnnnnnnnnnnnnnnnnnnnnnnnnnnnnnnnnnnnnnnnnnnnnnnnnnnnnnnnnnnnnnnnnnnnnnnnnnnnnnnnnnnnnnnnnnnnnnnnnnnnnnnnnnnnnnnnnnnnnnnnnnnnnnnnnnnnnnnnnnnnnnnnnnnnnnnnnnnnnnnnnnnnnnnnnnnnnnnnnnnnnnnnnnnnnnnnnnnnnnnnnnnnnnnnnnnnnnnnnnnnnnnnnnnnnnnnnnnnnnnnnnnnnnnnnnnnnnnnnnnnnnnnnnnnnnnnnnnnnnnnnnnnnnnnnnnnnnnnnnnnnnnnnnnnnnnnnnnnnnnnnnnnnnnnnnnnnnnnnnnnnnnnnnnnnnnnnnnnnnnnnnnnnnnnnnnnnnnnnnnnnnnnnnnnnnnnnnnnnnnnnnnnnnnnnnnnnnnnnnnnnnnnnnnnnnnnnnnnnnnnnnnnnnnnnnnnnnnnnnnnnnnnnnnnnnnnnnnnnnnnnnnnnnnnnnnnnnnnnnnnnnnnnnnnnnnnnnnnnnnnnnnnnnnnnnnnnnnnnnnnnnnnnnnnnnnnnnnnnnnnnnnnnnnnnnnnnnnnnnnnnnnnnnnnnnnnnnnnnnnnnnnnnnnnnnnnnnnnnnnnnnnnnnnnnnnnnnnnnnnnnnnnnnnnnnnnnnnnnnnnnnnnnnnnnnnnnnnnnnnnnnnnnnnnnnnnnnnnnnnnnnnnnnnnnnnnnnnnnnnnnnnnnnnnnnnnnnnnnnnnnnnnnnnnnnnnnnnnnnnnnnnnnnnnnnnnnnnnnnnnnnnnnnnnnnnnnnnnnnnnnnnnnnnnnnnnnnnnnnnnnnnnnnnnnnnnnnnnnnnnnnnnnnnnnnnnnnnnnnnnnnnnnnnnnnnnnnnnnnnnnnnnnnnnnnnnnnnnnnnnnnnnnnnnnnnnnnnnnnnnnnnnnnnnnnnnnnnnnnnnnnnnnnnnnnnnnnnnnnnnnnnnnnnnnnnnnnnnnnnnnnnnnnnnnnnnnnnnnnnnnnnnnnnnnnnnnnnnnnnnnnnnnnnnnnnnnnnnnnnnnnnnnnnnnnnnnnnnnnnnnnnnnnnnnnnnnnnnnnnnnnnnnnnnnnnnnnnnnnnnnnnnnnnnnnnnnnnnnnnnnnnnnnnnnnnnnnnnnnnnnnnnnnnnnnnnnnnnnnnnnnnnnnnnnnnnnnnnnnnnnnnnnnnnnnnnnnnnnnnnnnnnnnnnnnnnnnnnnnnnnnnnnnnnnnnnnnnnnnnnnnnnnnnnnnnnnnnnnnnnnnnnnnnnnnnnnnnnnnnnnnnnnnnnnnnnnnnnnnnnnnnnnnnnnnnnnnnnnnnnnnnnnnnnnnnnnnnnnnnnnnnnnnnnnnnnnnnnnnnnnnnnnnnnnnnnnnnnnnnnnnnnnnnnnnnnnnnnnnnnnnnnnnnnnnnnnnnnnnnnnnnnnnnnnnnnnnnnnnnnnnnnnnnnnnnnnnnnnnnnnnnnnnnnnnnnnnnnnnnnnnnnnnnnnnnnnnnnnnnnnnnnnnnnnnnnnnnnnnnnnnnnnnnnnnnnnnnnnnnnnnnnnnnnnnnnnnnnnnnnnnnnnnnnnnnnnnnnnnnnnnnnnnnnnnnnnnnnnnnnnnnnnnnnnnnnnnnnnnnnnnnnnnnnnnnnnnnnnnnnnnnnnnnnnnnnnnnnnnnnnnnnnnnnnnnnnnnnnnnnnnnnnnnnnnnnnnnnnnnnnnnnnnnnnnnnnnnnnnnnnnnnnnnnnnnnnnnnnnnnnnnnnnnnnnnnnnnnnnnnnnnnnnnnnnnnnnnnnnnnnnnnnnnnnnnnnnnnnnnnnnnnnnnnnnnnnnnnnnnnnnnnnnnnnnnnnnnnnnnnnnnnnnnnnnnnnnnnnnnnnnnnnnnnnnnnnnnnnnnnnnnnnnnnnnnnnnnnnnnnnnnnnnnnnnnnnnnnnnnnnnnnnnnnnnnnnnnnnnnnnnnnnnnnnnnnnnnnnnnnnnnnnnnnnnnnnnnnnnnnnnnnnnnnnnnnnnnnnnnnnnnnnnnnnnnnnnnnnnnnnnnnnnnnnnnnnnnnnnnnnnnnnnnnnnnnnnnnnnnnnnnnnnnnnnnnnnnnnnnnnnnnnnnnnnnnnnnnnnnnnnnnnnnnnnnnnnnnnnnnnnnnnnnnnnnnnnnnnnnnnnnnnnnnnnnnnnnnnnnnnnnnnnnnnnnnnnnnnnnnnnnnnnnnnnnnnnnnnnnnnnnnnnnnnnnnnnnnnnnnnnnnnnnnnnnnnnnnnnnnnnnnnnnnnnnnnnnnnnnnnnnnnnnnnnnnnnnnnnnnnnnnnnnnnnnnnnnnnnnnnnnnnnnnnnnnnnnnnnnnnnnnnnnnnnnnnnnnnnnnnnnnnnnnnnnnnnnnnnnnnnnnnnnnnnnnnnnnnnnnnnnnnnnnnnnnnnnnnnnnnnnnnnnnnnnnnnnnnnnnnnnnnnnnnnnnnnnnnnnnnnnnnnnnnnnnnnnnnnnnnnnnnnnnnnnnnnnnnnnnnnnnnnnnnnnnnnnnnnnnnnnnnnnnnnnnnnnnnnnnnnnnnnnnnnnnnnnnnnnnnnnnnnnnnnnnnnnnnnnnnnnnnnnnnnnnnnnnnnnnnnnnnnnnnnnnnnnnnnnnnnnnnnnnnnnnnnnnnnnnnnnnnnnnnnnnnnnnnnnnnnnnnnnnnnnnnnnnnnnnnnnnnnnnnnnnnnnnnnnnnnnnnnnnnnnnnnnnnnnnnnnnnnnnnnnnnnnnnnnnnnnnnnnnnnnnnnnnnnnnnnnnnnnnnnnnnnnnnnnnnnnnnnnnnnnnnnnnnnnnnnnnnnnnnnnnnnnnnnnnnnnnnnnnnnnnnnnnnnnnnnnnnnnnnnnnnnnnnnnnnnnnnnnnnnnnnnnnnnnnnnnnnnnnnnnnnnnnnnnnnnnnnnnnnnnnnnnnnnnnnnnnnnnnnnnnnnnnnnnnnnnnnnnnnnnnnnnnnnnnnnnnnnnnnnnnnnnnnnnnnnnnnnnnnnnnnnnnnnnnnnnnnnnnnnnnnnnnnnnnnnnnnnnnnnnnnnnnnnnnnnnnnnnnnnnnnnnnnnnnnnnnnnnnnnnnnnnnnnnnnnnnnnnnnnnnnnnnnnnnnnnnnnnnnnnnnnnnnnnnnnnnnnnnnnnnnnnnnnnnnnnnnnnnnnnnnnnnnnnnnnnnnnnnnnnnnnnnnnnnnnnnnnnnnnnnnnnnnnnnnnnnnnnnnnnnnnnnnnnnnnnnnnnnnnnnnnnnnnnnnnnnnnnnnnnnnnnnnnnnnnnnnnnnnnnnnnnnnnnnnnnnnnnnnnnnnnnnnnnnnnnnnnnnnnnnnnnnnnnnnnnnnnnnnnnnnnnnnnnnnnnnnnnnnnnnnnnnnnnnnnnnnnnnnnnnnnnnnnnnnnnnnnnnnnnnnnnnnnnnnnnnnnnnnnnnnnnnnnnnnnnnnnnnnnnnnnnnnnnnnnnnnnnnnnnnnnnnnnnnnnnnnnnnnnnnnnnnnnnnnnnnnnnnnnnnnnnnnnnnnnnnnnnnnnnnnnnnnnnnnnnnnnnnnnnnnnnnnnnnnnnnnnnnnnnnnnnnnnnnnnnnnnnnnnnnnnnnnnnnnnnnnnnnnnnnnnnnnnnnnnnnnnnnnnnnnnnnnnnnnnnnnnnnnnnnnnnnnnnnnnnnnnnnnnnnnnnnnnnnnnnnnnnnnnnnnnnnnnnnnnnnnnnnnnnnnnnnnnnnnnnnnnnnnnnnnnnnnnnnnnnnnnnnnnnnnnnnnnnnnnnnnnnnnnnnnnnnnnnnnnnnnnnnnnnnnnnnnnnnnnnnnnnnnnnnnnnnnnnnnnnnnnnnnnnnnnnnnnnnnnnnnnnnnnnnnnnnnnnnnnnnnnnnnnnnnnnnnnnnnnnnnnnnnnnnnnnnnnnnnnnnnnnnnnnnnnnnnnnnnnnnnnnnnnnnnnnnnnnnnnnnnnnnnnnnnnnnnnnnnnnnnnnnnnnnnnnnnnnnnnnnnnnnnnnnnnnnnnnnnnnnnnnnnnnnnnnnnnnnnnnnnnnnnnnnnnnnnnnnnnnnnnnnnnnnnnnnnnnnnnnnnnnnnnnnnnnnnnnnnnnnnnnnnnnnnnnnnnnnnnnnnnnnnnnnnnnnnnnnnnnnnnnnnnnnnnnnnnnnnnnnnnnnnnnnnnnnnnnnnnnnnnnnnnnnnnnnnnnnnnnnnnnnnnnnnnnnnnnnnnnnnnnnnnnnnnnnnnnnnnnnnnnnnnnnnnnnnnnnnnnnnnnnnnnnnnnnnnnnnnnnnnnnnnnnnnnnnnnnnnnnnnnnnnnnnnnnnnnnnnnnnnnnnnnnnnnnnnnnnnnnnnnnnnnnnnnnnnnnnnnnnnnnnnnnnnnnnnnnnnnnnnnnnnnnnnnnnnnnnnnnnnnnnnnnnnnnnnnnnnnnnnnnnnnnnnnnnnnnnnnnnnnnnnnnnnnnnnnnnnnnnnnnnnnnnnnnnnnnnnnnnnnnnnnnnnnnnnnnnnnnnnnnnnnnnnnnnnnnnnnnnnnnnnnnnnnnnnnnnnnnnnnnnnnnnnnnnnnnnnnnnnnnnnnnnnnnnnnnnnnnnnnnnnnnnnnnnnnnnnnnnnnnnnnnnnnnnnnnnnnnnnnnnnnnnnnnnnnnnnnnnnnnnnnnnnnnnnnnnnnnnnnnnnnnnnnnnnnnnnnnnnnnnnnnnnnnnnnnnnnnnnnnnnnnnnnnnnnnnnnnnnnnnnnnnnnnnnnnnnnnnnnnnnnnnnnnnnnnnnnnnnnnnnnnnnnnnnnnnnnnnnnnnnnnnnnnnnnnnnnnnnnnnnnnnnnnnnnnnnnnnnnnnnnnnnnnnnnnnnnnnnnnnnnnnnnnnnnnnnnnnnnnnnnnnnnnnnnnnnnnnnnnnnnnnnnnnnnnnnnnnnnnnnnnnnnnnnnnnnnnnnnnnnnnnnnnnnnnnnnnnnnnnnnnnnnnnnnnnnnnnnnnnnnnnnnnnnnnnnnnnnnnnnnnnnnnnnnnnnnnnnnnnnnnnnnnnnnnnnnnnnnnnnnnnnnnnnnnnnnnnnnnnnnnnnnnnnnnnnnnnnnnnnnnnnnnnnnnnnnnnnnnnnnnnnnnnnnnnnnnnnnnnnnnnnnnnnnnnnnnnnnnnnnnnnnnnnnnnnnnnnnnnnnnnnnnnnnnnnnnnnnnnnnnnnnnnnnnnnnnnnnnnnnnnnnnnnnnnnnnnnnnnnnnnnnnnnnnnnnnnnnnnnnnnnnnnnnnnnnnnnnnnnnnnnnnnnnnnnnnnnnnnnnnnnnnnnnnnnnnnnnnnnnnnnnnnnnnnnnnnnnnnnnnnnnnnnnnnnnnnnnnnnnnnnnnnnnnnnnnnnnnnnnnnnnnnnnnnnnnnnnnnnnnnnnnnnnnnnnnnnnnnnnnnnnnnnnnnnnnnnnnnnnnnnnnnnnnnnnnnnnnnnnnnnnnnnnnnnnnnnnnnnnnnnnnnnnnnnnnnnnnnnnnnnnnnnnnnnnnnnnnnnnnnnnnnnnnnnnnnnnnnnnnnnnnnnnnnnnnnnnnnnnnnnnnnnnnnnnnnnnnnnnnnnnnnnnnnnnnnnnnnnnnnnnnnnnnnnnnnnnnnnnnnnnnnnnnnnnnnnnnnnnnnnnnnnnnnnnnnnnnnnnnnnnnnnnnnnnnnnnnnnnnnnnnnnnnnnnnnnnnnnnnnnnnnnnnnnnnnnnnnnnnnnnnnnnnnnnnnnnnnnnnnnnnnnnnnnnnnnnnnnnnnnnnnnnnnnnnnnnnnnnnnnnnnnnnnnnnnnnnnnnnnnnnnnnnnnnnnnnnnnnnnnnnnnnnnnnnnnnnnnnnnnnnnnnnnnnnnnnnnnnnnnnnnnnnnnnnnnnnnnnnnnnnnnnnnnnnnnnnnnnnnnnnnnnnnnnnnnnnnnnnnnnnnnnnnnnnnnnnnnnnnnnnnnnnnnnnnnnnnnnnnnnnnnnnnnnnnnnnnnnnnnnnnnnnnnnnnnnnnnnnnnnnnnnnnnnnnnnnnnnnnnnnnnnnnnnnnnnnnnnnnnnnnnnnnnnnnnnnnnnnnnnnnnnnnnnnnnnnnnnnnnnnnnnnnnnnnnnnnnnnnnnnnnnnnnnnnnnnnnnnnnnnnnnnnnnnnnnnnnnnnnnnnnnnnnnnnnnnnnnnnnnnnnnnnnnnnnnnnnnnnnnnnnnnnnnnnnnnnnnnnnnnnnnnnnnnnnnnnnnnnnnnnnnnnnnnnnnnnnnnnnnnnnnnnnnnnnnnnnnnnnnnnnnnnnnnnnnnnnnnnnnnnnnnnnnnnnnnnnnnnnnnnnnnnnnnnnnnnnnnnnnnnnnnnnnnnnnnnnnnnnnnnnnnnnnnnnnnnnnnnnnnnnnnnnnnnnnnnnnnnnnnnnnnnnnnnnnnnnnnnnnnnnnnnnnnnnnnnnnnnnnnnnnnnnnnnnnnnnnnnnnnnnnnnnnnnnnnnnnnnnnnnnnnnnnnnnnnnnnnnnnnnnnnnnnnnnnnnnnnnnnnnnnnnnnnnnnnnnnnnnnnnnnnnnnnnnnnnnnnnnnnnnnnnnnnnnnnnnnnnnnnnnnnnnnnnnnnnnnnnnnnnnnnnnnnnnnnnnnnnnnnnnnnnnnnnnnnnnnnnnnnnnnnnnnnnnnnnnnnnnnnnnnnnnnnnnnnnnnnnnnnnnnnnnnnnnnnnnnnnnnnnnnnnnnnnnnnnnnnnnnnnnnnnnnnnnnnnnnnnnnnnnnnnnnnnnnnnnnnnnnnnnnnnnnnnnnnnnnnnnnnnnnnnnnnnnnnnnnnnnnnnnnnnnnnnnnnnnnnnnnnnnnnnnnnnnnnnnnnnnnnnnnnnnnnnnnnnnnnnnnnnnnnnnnnnnnnnnnnnnnnnnnnnnnnnnnnnnnnnnnnnnnnnnnnnnnnnnnnnnnnnnnnnnnnnnnnnnnnnnnnnnnnnnnnnnnnnnnnnnnnnnnnnnnnnnnnnnnnnnnnnnnnnnnnnnnnnnnnnnnnnnnnnnnnnnnnnnnnnnnnnnnnnnnnnnnnnnnnnnnnnnnnnnnnnnnnnnnnnnnnnnnnnnnnnnnnnnnnnnnnnnnnnnnnnnnnnnnnnnnnnnnnnnnnnnnnnnnnnnnnnnnnnnnnnnnnnnnnnnnnnnnnnnnnnnnnnnnnnnnnnnnnnnnnnnnnnnnnnnnnnnnnnnnnnnnnnnnnnnnnnnnnnnnnnnnnnnnnnnnnnnnnnnnnnnnnnnnnnnnnnnnnnnnnnnnnnnnnnnnnnnnnnnnnnnnnnnnnnnnnnnnnnnnnnnnnnnnnnnnnnnnnnnnnnnnnnnnnnnnnnnnnnnnnnnnnnnnnnnnnnnnnnnnnnnnnnnnnnnnnnnnnnnnnnnnnnnnnnnnnnnnnnnnnnnnnnnnnnnnnnnnnnnnnnnnnnnnnnnnnnnnnnnnnnnnnnnnnnnnnnnnnnnnnnnnnnnnnnnnnnnnnnnnnnnnnnnnnnnnnnnnnnnnnnnnnnnnnnnnnnnnnnnnnnnnnnnnnnnnnnnnnnnnnnnnnnnnnnnnnnnnnnnnnnnnnnnnnnnnnnnnnnnnnnnnnnnnnnnnnnnnnnnnnnnnnnnnnnnnnnnnnnnnnnnnnnnnnnnnnnnnnnnnnnnnnnnnnnnnnnnnnnnnnnnnnnnnnnnnnnnnnnnnnnnnnnnnnnnnnnnnnnnnnnnnnnnnnnnnnnnnnnnnnnnnnnnnnnnnnnnnnnnnnnnnnnnnnnnnnnnnnnnnnnnnnnnnnnnnnnnnnnnnnnnnnnnnnnnnnnnnnnnnnnnnnnnnnnnnnnnnnnnnnnnnnnnnnnnnnnnnnnnnnnnnnnnnnnnnnnnnnnnnnnnnnnnnnnnnnnnnnnnnnnnnnnnnnnnnnnnnnnnnnnnnnnnnnnnnnnnnnnnnnnnnnnnnnnnnnnnnnnnnnnnnnnnnnnnnnnnnnnnnnnnnnnnnnnnnnnnnnnnnnnnnnnnnnnnnnnnnnnnnnnnnnnnnnnnnnnnnnnnnnnnnnnnnnnnnnnnnnnnnnnnnnnnnnnnnnnnnnnnnnnnnnnnnnnnnnnnnnnnnnnnnnnnnnnnnnnnnnnnnnnnnnnnnnnnnnnnnnnnnnnnnnnnnnnnnnnnnnnnnnnnnnnnnnnnnnnnnnnnnnnnnnnnnnnnnnnnnnnnnnnnnnnnnnnnnnnnnnnnnnnnnnnnnnnnnnnnnnnnnnnnnnnnnnnnnnnnnnnnnnnnnnnnnnnnnnnnnnnnnnnnnnnnnnnnnnnnnnnnnnnnnnnnnnnnnnnnnnnnnnnnnnnnnnnnnnnnnnnnnnnnnnnnnnnnnnnnnnnnnnnnnnnnnnnnnnnnnnnnnnnnnnnnnnnnnnnnnnnnnnnnnnnnnnnnnnnnnnnnnnnnnnnnnnnnnnnnnnnnnnnnnnnnnnnnnnnnnnnnnnnnnnnnnnnnnnnnnnnnnnnnnnnnnnnnnnnnnnnnnnnnnnnnnnnnnnnnnnnnnnnnnnnnnnnnnnnnnnnnnnnnnnnnnnnnnnnnnnnnnnnnnnnnnnnnnnnnnnnnnnnnnnnnnnnnnnnnnnnnnnnnnnnnnnnnnnnnnnnnnnnnnnnnnnnnnnnnnnnnnnnnnnnnnnnnnnnnnnnnnnnnnnnnnnnnnnnnnnnnnnnnnnnnnnnnnnnnnnnnnnnnnnnnnnnnnnnnnnnnnnnnnnnnnnnnnnnnnnnnnnnnnnnnnnnnnnnnnnnnnnnnnnnnnnnnnnnnnnnnnnnnnnnnnnnnnnnnnnnnnnnnnnnnnnnnnnnnnnnnnnnnnnnnnnnnnnnnnnnnnnnnnnnnnnnnnnnnnnnnnnnnnnnnnnnnnnnnnnnnnnnnnnnnnnnnnnnnnnnnnnnnnnnnnnnnnnnnnnnnnnnnnnnnnnnnnnnnnnnnnnnnnnnnnnnnnnnnnnnnnnnnnnnnnnnnnnnnnnnnnnnnnnnnnnnnnnnnnnnnnnnnnnnnnnnnnnnnnnnnnnnnnnnnnnnnnnnnnnnnnnnnnnnnnnnnnnnnnnnnnnnnnnnnnnnnnnnnnnnnnnnnnnnnnnnnnnnnnnnnnnnnnnnnnnnnnnnnnnnnnnnnnnnnnnnnnnnnnnnnnnnnnnnnnnnnnnnnnnnnnnnnnnnnnnnnnnnnnnnnnnnnnnnnnnnnnnnnnnnnnnnnnnnnnnnnnnnnnnnnnnnnnnnnnnnnnnnnnnnnnnnnnnnnnnnnnnnnnnnnnnnnnnnnnnnnnnnnnnnnnnnnnnnnnnnnnnnnnnnnnnnnnnnnnnnnnnnnnnnnnnnnnnnnnnnnnnnnnnnnnnnnnnnnnnnnnnnnnnnnnnnnnnnnnnnnnnnnnnnnnnnnnnnnnnnnnnnnnnnnnnnnnnnnnnnnnnnnnnnnnnnnnnnnnnnnnnnnnnnnnnnnnnnnnnnnnnnnnnnnnnnnnnnnnnnnnnnnnnnnnnnnnnnnnnnnnnnnnnnnnnnnnnnnnnnnnnnnnnnnnnnnnnnnnnnnnnnnnnnnnnnnnnnnnnnnnnnnnnnnnnnnnnnnnnnnnnnnnnnnnnnnnnnnnnnnnnnnnnnnnnnnnnnnnnnnnnnnnnnnnnnnnnnnnnnnnnnnnnnnnnnnnnnnnnnnnnnnnnnnnnnnnnnnnnnnnnnnnnnnnnnnnnnnnnnnnnnnnnnnnnnnnnnnnnnnnnnnnnnnnnnnnnnnnnnnnnnnnnnnnnnnnnnnnnnnnnnnnnnnnnnnnnnnnnnnnnnnnnnnnnnnnnnnnnnnnnnnnnnnnnnnnnnnnnnnnnnnnnnnnnnnnnnnnnnnnnnnnnnnnnnnnnnnnnnnnnnnnnnnnnnnnnnnnnnnnnnnnnnnnnnnnnnnnnnnnnnnnnnnnnnnnnnnnnnnnnnnnnnnnnnnnnnnnnnnnnnnnnnnnnnnnnnnnnnnnnnnnnnnnnnnnnnnnnnnnnnnnnnnnnnnnnnnnnnnnnnnnnnnnnnnnnnnnnnnnnnnnnnnnnnnnnnnnnnnnnnnnnnnnnnnnnnnnnnnnnnnnnnnnnnnnnnnnnnnnnnnnnnnnnnnnnnnnnnnnnnnnnnnnnnnnnnnnnnnnnnnnnnnnnnnnnnnnnnnnnnnnnnnnnnnnnnnnnnnnnnnnnnnnnnnnnnnnnnnnnnnnnnnnnnnnnnnnnnnnnnnnnnnnnnnnnnnnnnnnnnnnnnnnnnnnnnnnnnnnnnnnnnnnnnnnnnnnnnnnnnnnnnnnnnnnnnnnnnnnnnnnnnnnnnnnnnnnnnnnnnnnnnnnnnnnnnnnnnnnnnnnnnnnnnnnnnnnnnnnnnnnnnnnnnnnnnnnnnnnnnnnnnnnnnnnnnnnnnnnnnnnnnnnnnnnnnnnnnnnnnnnnnnnnnnnnnnnnnnnnnnnnnnnnnnnnnnnnnnnnnnnnnnnnnnnnnnnnnnnnnnnnnnnnnnnnnnnnnnnnnnnnnnnnnnnnnnnnnnnnnnnnnnnnnnnnnnnnnnnnnnnnnnnnnnnnnnnnnnnnnnnnnnnnnnnnnnnnnnnnnnnnnnnnnnnnnnnnnnnnnnnnnnnnnnnnnnnnnnnnnnnnnnnnnnnnnnnnnnnnnnnnnnnnnnnnnnnnnnnnnnnnnnnnnnnnnnnnnnnnnnnnnnnnnnnnnnnnnnnnnnnnnnnnnnnnnnnnnnnnnnnnnnnnnnnnnnnnnnnnnnnnnnnnnnnnnnnnnnnnnnnnnnnnnnnnnnnnnnnnnnnnnnnnnnnnnnnnnnnnnnnnnnnnnnnnnnnnnnnnnnnnnnnnnnnnnnnnnnnnnnnnnnnnnnnnnnnnnnnnnnnnnnnnnnnnnnnnnnnnnnnnnnnnnnnnnnnnnnnnnnnnnnnnnnnnnnnnnnnnnnnnnnnnnnnnnnnnnnnnnnnnnnnnnnnnnnnnnnnnnnnnnnnnnnnnnnnnnnnnnnnnnnnnnnnnnnnnnnnnnnnnnnnnnnnnnnnnnnnnnnnnnnnnnnnnnnnnnnnnnnnnnnnnnnnnnnnnnnnnnnnnnnnnnnnnnnnnnnnnnnnnnnnnnnnnnnnnnnnnnnnnnnnnnnnnnnnnnnnnnnnnnnnnnnnnnnnnnnnnnnnnnnnnnnnnnnnnnnnnnnnnnnnnnnnnnnnnnnnnnnnnnnnnnnnnnnnnnnnnnnnnnnnnnnnnnnnnnnnnnnnnnnnnnnnnnnnnnnnnnnnnnnnnnnnnnnnnnnnnnnnnnnnnnnnnnnnnnnnnnnnnnnnnnnnnnnnnnnnnnnnnnnnnnnnnnnnnnnnnnnnnnnnnnnnnnnnnnnnnnnnnnnnnnnnnnnnnnnnnnnnnnnnnnnnnnnnnnnnnnnnnnnnnnnnnnnnnnnnnnnnnnnnnnnnnnnnnnnnnnnnnnnnnnnnnnnnnnnnnnnnnnnnnnnnnnnnnnnnnnnnnnnnnnnnnnnnnnnnnnnnnnnnnnnnnnnnnnnnnnnnnnnnnnnnnnnnnnnnnnnnnnnnnnnnnnnnnnnnnnnnnnnnnnnnnnnnnnnnnnnnnnnnnnnnnnnnnnnnnnnnnnnnnnnnnnnnnnnnnnnnnnnnnnnnnnnnnnnnnnnnnnnnnnnnnnnnnnnnnnnnnnnnnnnnnnnnnnnnnnnnnnnnnnnnnnnnnnnnnnnnnnnnnnnnnnnnnnnnnnnnnnnnnnnnnnnnnnnnnnnnnnnnnnnnnnnnnnnnnnnnnnnnnnnnnnnnnnnnnnnnnnnnnnnnnnnnnnnnnnnnnnnnnnnnnnnnnnnnnnnnnnnnnnnnnnnnnnnnnnnnnnnnnnnnnnnnnnnnnnnnnnnnnnnnnnnnnnnnnnnnnnnnnnnnnnnnnnnnnnnnnnnnnnnnnnnnnnnnnnnnnnnnnnnnnnnnnnnnnnnnnnnnnnnnnnnnnnnnnnnnnnnnnnnnnnnnnnnnnnnnnnnnnnnnnnnnnnnnnnnnnnnnnnnnnnnnnnnnnnnnnnnnnnnnnnnnnnnnnnnnnnnnnnnnnnnnnnnnnnnnnnnnnnnnnnnnnnnnnnnnnnnnnnnnnnnnnnnnnnnnnnnnnnnnnnnnnnnnnnnnnnnnnnnnnnnnnnnnnnnnnnnnnnnnnnnnnnnnnnnnnnnnnnnnnnnnnnnnnnnnnnnnnnnnnnnnnnnnnnnnnnnnnnnnnnnnnnnnnnnnnnnnnnnnnnnnnnnnnnnnnnnnnnnnnnnnnnnnnnnnnnnnnnnnnnnnnnnnnnnnnnnnnnnnnnnnnnnnnnnnnnnnnnnnnnnnnnnnnnnnnnnnnnnnnnnnnnnnnnnnnnnnnnnnnnnnnnnnnnnnnnnnnnnnnnnnnnnnnnnnnnnnnnnnnnnnnnnnnnnnnnnnnnnnnnnnnnnnnnnnnnnnnnnnnnnnnnnnnnnnnnnnnnnnnnnnnnnnnnnnnnnnnnnnnnnnnnnnnnnnnnnnnnnnnnnnnnnnnnnnnnnnnnnnnnnnnnnnnnnnnnnnnnnnnnnnnnnnnnnnnnnnnnnnnnnnnnnnnnnnnnnnnnnnnnnnnnnnnnnnnnnnnnnnnnnnnnnnnnnnnnnnnnnnnnnnnnnnnnnnnnnnnnnnnnnnnnnnnnnnnnnnnnnnnnnnnnnnnnnnnnnnnnnnnnnnnnnnnnnnnnnnnnnnnnnnnnnnnnnnnnnnnnnnnnnnnnnnnnnnnnnnnnnnnnnnnnnnnnnnnnnnnnnnnnnnnnnnnnnnnnnnnnnnnnnnnnnnnnnnnnnnnnnnnnnnnnnnnnnnnnnnnnnnnnnnnnnnnnnnnnnnnnnnnnnnnnnnnnnnnnnnnnnnnnnnnnnnnnnnnnnnnnnnnnnnnnnnnnnnnnnnnnnnnnnnnnnnnnnnnnnnnnnnnnnnnnnnnnnnnnnnnnnnnnnnnnnnnnnnnnnnnnnnnnnnnnnnnnnnnnnnnnnnnnnnnnnnnnnnnnnnnnnnnnnnnnnnnnnnnnnnnnnnnnnnnnnnnnnnnnnnnnnnnnnnnnnnnnnnnnnnnnnnnnnnnnnnnnnnnnnnnnnnnnnnnnnnnnnnnnnnnnnnnnnnnnnnnnnnnnnnnnnnnnnnnnnnnnnnnnnnnnnnnnnnnnnnnnnnnnnnnnnnnnnnnnnnnnnnnnnnnnnnnnnnnnnnnnnnnnnnnnnnnnnnnnnnnnnnnnnnnnnnnnnnnnnnnnnnnnnnnnnnnnnnnnnnnnnnnnnnnnnnnnnnnnnnnnnnnnnnnnnnnnnnnnnnnnnnnnnnnnnnnnnnnnnnnnnnnnnnnnnnnnnnnnnnnnnnnnnnnnnnnnnnnnnnnnnnnnnnnnnnnnnnnnnnnnnnnnnnnnnnnnnnnnnnnnnnnnnnnnnnnnnnnnnnnnnnnnnnnnnnnnnnnnnnnnnnnnnnnnnnnnnnnnnnnnnnnnnnnnnnnnnnnnnnnnnnnnnnnnnnnnnnnnnnnnnnnnnnnnnnnnnnnnnnnnnnnnnnnnnnnnnnnnnnnnnnnnnnnnnnnnnnnnnnnnnnnnnnnnnnnnnnnnnnnnnnnnnnnnnnnnnnnnnnnnnnnnnnnnnnnnnnnnnnnnnnnnnnnnnnnnnnnnnnnnnnnnnnnnnnnnnnnnnnnnnnnnnnnnnnnnnnnnnnnnnnnnnnnnnnnnnnnnnnnnnnnnnnnnnnnnnnnnnnnnnnnnnnnnnnnnnnnnnnnnnnnnnnnnnnnnnnnnnnnnnnnnnnnnnnnnnnnnnnnnnnnnnnnnnnnnnnnnnnnnnnnnnnnnnnnnnnnnnnnnnnnnnnnnnnnnnnnnnnnnnnnnnnnnnnnnnnnnnnnnnnnnnnnnnnnnnnnnnnnnnnnnnnnnnnnnnnnnnnnnnnnnnnnnnnnnnnnnnnnnnnnnnnnnnnnnnnnnnnnnnnnnnnnnnnnnnnnnnnnnnnnnnnnnnnnnnnnnnnnnnnnnnnnnnnnnnnnnnnnnnnnnnnnnnnnnnnnnnnnnnnnnnnnnnnnnnnnnnnnnnnnnnnnnnnnnnnnnnnnnnnnnnnnnnnnnnnnnnnnnnnnnnnnnnnnnnnnnnnnnnnnnnnnnnnnnnnnnnnnnnnnnnnnnnnnnnnnnnnnnnnnnnnnnnnnnnnnnnnnnnnnnnnnnnnnnnnnnnnnnnnnnnnnnnnnnnnnnnnnnnnnnnnnnnnnnnnnnnnnnnnnnnnnnnnnnnnnnnnnnnnnnnnnnnnnnnnnnnnnnnnnnnnnnnnnnnnnnnnnnnnnnnnnnnnnnnnnnnnnnnnnnnnnnnnnnnnnnnnnnnnnnnnnnnnnnnnnnnnnnnnnnnnnnnnnnnnnnnnnnnnnnnnnnnnnnnnnnnnnnnnnnnnnnnnnnnnnnnnnnnnnnnnnnnnnnnnnnnnnnnnnnnnnnnnnnnnnnnnnnnnnnnnnnnnnnnnnnnnnnnnnnnnnnnnnnnnnnnnnnnnnnnnnnnnnnnnnnnnnnnnnnnnnnnnnnnnnnnnnnnnnnnnnnnnnnnnnnnnnnnnnnnnnnnnnnnnnnnnnnnnnnnnnnnnnnnnnnnnnnnnnnnnnnnnnnnnnnnnnnnnnnnnnnnnnnnnnnnnnnnnnnnnnnnnnnnnnnnnnnnnnnnnnnnnnnnnnnnnnnnnnnnnnnnnnnnnnnnnnnnnnnnnnnnnnnnnnnnnnnnnnnnnnnnnnnnnnnnnnnnnnnnnnnnnnnnnnnnnnnnnnnnnnnnnnnnnnnnnnnnnnnnnnnnnnnnnnnnnnnnnnnnnnnnnnnnnnnnnnnnnnnnnnnnnnnnnnnnnnnnnnnnnnnnnnnnnnnnnnnnnnnnnnnnnnnnnnnnnnnnnnnnnnnnnnnnnnnnnnnnnnnnnnnnnnnnnnnnnnnnnnnnnnnnnnnnnnnnnnnnnnnnnnnnnnnnnnnnnnnnnnnnnnnnnnnnnnnnnnnnnnnnnnnnnnnnnnnnnnnnnnnnnnnnnnnnnnnnnnnnnnnnnnnnnnnnnnnnnnnnnnnnnnnnnnnnnnnnnnnnnnnnnnnnnnnnnnnnnnnnnnnnnnnnnnnnnnnnnnnnnnnnnnnnnnnnnnnnnnnnnnnnnnnnnnnnnnnnnnnnnnnnnnnnnnnnnnnnnnnnnnnnnnnnnnnnnnnnnnnnnnnnnnnnnnnnnnnnnnnnnnnnnnnnnnnnnnnnnnnnnnnnnnnnnnnnnnnnnnnnnnnnnnnnnnnnnnnnnnnnnnnnnnnnnnnnnnnnnnnnnnnnnnnnnnnnnnnnnnnnnnnnnnnnnnnnnnnnnnnnnnnnnnnnnnnnnnnnnnnnnnnnnnnnnnnnnnnnnnnnnnnnnnnnnnnnnnnnnnnnnnnnnnnnnnnnnnnnnnnnnnnnnnnnnnnnnnnnnnnnnnnnnnnnnnnnnnnnnnnnnnnnnnnnnnnnnnnnnnnnnnnnnnnnnnnnnnnnnnnnnnnnnnnnnnnnnnnnnnnnnnnnnnnnnnnnnnnnnnnnnnnnnnnnnnnnnnnnnnnnnnnnnnnnnnnnnnnnnnnnnnnnnnnnnnnnnnnnnnnnnnnnnnnnnnnnnnnnnnnnnnnnnnnnnnnnnnnnnnnnnnnnnnnnnnnnnnnnnnnnnnnnnnnnnnnnnnnnnnnnnnnnnnnnnnnnnnnnnnnnnnnnnnnnnnnnnnnnnnnnnnnnnnnnnnnnnnnnnnnnnnnnnnnnnnnnnnnnnnnnnnnnnnnnnnnnnnnnnnnnnnnnnnnnnnnnnnnnnnnnnnnnnnnnnnnnnnnnnnnnnnnnnnnnnnnnnnnnnnnnnnnnnnnnnnnnnnnnnnnnnnnnnnnnnnnnnnnnnnnnnnnnnnnnnnnnnnnnnnnnnnnnnnnnnnnnnnnnnnnnnnnnnnnnnnnnnnnnnnnnnnnnnnnnnnnnnnnnnnnnnnnnnnnnnnnnnnnnnnnnnnnnnnnnnnnnnnnnnnnnnnnnnnnnnnnnnnnnnnnnnnnnnnnnnnnnnnnnnnnnnnnnnnnnnnnnnnnnnnnnnnnnnnnnnnnnnnnnnnnnnnnnnnnnnnnnnnnnnnnnnnnnnnnnnnnnnnnnnnnnnnnnnnnnnnnnnnnnnnnnnnnnnnnnnnnnnnnnnnnnnnnnnnnnnnnnnnnnnnnnnnnnnnnnnnnnnnnnnnnnnnnnnnnnnnnnnnnnnnnnnnnnnnnnnnnnnnnnnnnnnnnnnnnnnnnnnnnnnnnnnnnnnnnnnnnnnnnnnnnnnnnnnnnnnnnnnnnnnnnnnnnnnnnnnnnnnnnnnnnnnnnnnnnnnnnnnnnnnnnnnnnnnnnnnnnnnnnnnnnnnnnnnnnnnnnnnnnnnnnnnnnnnnnnnnnnnnnnnnnnnnnnnnnnnnnnnnnnnnnnnnnnnnnnnnnnnnnnnnnnnnnnnnnnnnnnnnncggacgcgattccacgccgtgatgaggaactggtacgactcgctcagactggcaagaagcgtgatcaccaagtcgtcctcgctgaccggagcgccgaccgcgtcgagctgttccgccagcgtcttgagcttgttaatgtgctccagcacatcatcaccttcgtccatcgttgtcgtgaagaaccgtcgacgaagaaagagcttgttcgccaggctcttcttctcgaagtgtccctcgagtcttgaccatgcatcatgcgcgtccttcgccgaccgcaccagcggcagctgcgagtcctccaacgcgagacagacgatcgccagcgccttgcgcgacttcttgcgaaacgtcgcttggtccgccgcggtcgtgcactgctcgagcttcacttccccactcgtcacttcccacagttcgcgctcctccagcaccatctgcatcttgaacttccatgtgtggaagttggttccgtcgaacttgttgatgcgggcggtcgcggtcggggcggcgtccatggcgaaggcgtagtcggggtcttggtcagggaagacggggcttgggctcataaccaaaaggaagagcacttgagcagtagttggcaaaatgcaaagtgattcgattcaggtccttagttcgcaaccgcgtgctacctctaagcctgctactggatacctcttactggatacaccctactggattctctactggatacacagttaccttatccaatcagagaacgccacgtcgatgcccatcttgtacccacaatcttggcgtaatcaccgtgacgtaatcatcgtcccgtaatcacctgaatgatttcggtaccacacagtgaaggtcacgccgacctcactgatgacgcgttcgcgtcacacggtcgcttggcggggcgtcgtcacatcagtcttgacaacaggctctcggcattcgtgggacttcgcattgagggggcgtattgagggttgctggtcttgggtactgtgtaccagttgtacccattaaccggttaacccgaaccggtccaatccgaacccacgttgattatggtgattacggtaagttgtttacgccaccgatgattagacgagtaggatgattggatgaacaccggtgagtgatggttgattagatgcactaggtgataggacgcagggtcgcgtgtctataacagtagggtgtaagctccaacaattcaatcactttcgaatcttcattctacccctcaagtgcctccgctccggtcccgccgtctgcgacgtccctccctccgcttcttccgagcttcgtgtccaagatccataccttccatcacctaccaataaaaacaactcggtgaaatccgaggacccaaatccgggcacgcgcaccagtcgtgacgaggctcggtgaaagcctgaaccgtccaggaggtttttgtatagcggtagcccgggctttggtgttgcaaagcctccagagggggtgtccctggaaccacagtcctttgaaaccggagttccttgaaaccaagtttcagggatggcgtgtcaccttgtgaatccctatcggcgtcgtttgcctttggggagcctggatcgatcaccaagtgagttgttcaatacaaataggcagttaaacagttgagcgtgacgtccacttgaacacactactcaatggcgaggggaccggaggcgcaacgagatgggtaaactggtaggtccacgaggaaatcccagaatacactcagcttccgataaaccaatacaatacagagttatacacaacaaacagccgccacttattcttcgacccttgggcggtgggtcttacaccagtcgactaggccgattccagagtactggtcaactctggggcctttcgcaacgctcaccaccctctaacgagggaaatatacacaatccaatataatcctctctcacaaatgcagtctcaaagtcaaacactcaggggacaactgctaataaatctccccaagctcaattagtaacatgaaatgggacaccacccttatctacacgcaatgggcccaactaggatatgaaatgcgtggatcacttcagacgctcgagcgaatgatccccacgcagatggacttgatgatggtggggagctccgcgacgaccgtgtccttggcgaccgacgggcccgattcctggctggcagtgactctcgacttgcgcagtagtgggtaaaacgaactctctgattgttttctgctagactatcgctaagctcaatgtaaaggctatcttcttctgggttcttctgtgttcttccgtgttccttgcgtgcgatcttcgtgaatatcttgacttgagtatgtttgggggcgttgtttacggcgacttcgaagtagactggatttttcatcccatcatcccactcttcagtcagtgacgtctgggtacaaatcaggtcaggcatcgtcgcttggtttcaggcttggatccgagggtgcgtttcagggatccttgattctgcagcacttgggttcaggtatccggttccagggggccagcggcttgcacgaagcgcgacttgtgttgcgaggcttgagcttgttccgggtgcgcaaggtagtttgtgggtctttatcgaagcgaggtgggacgccagctgcaatacgttcgcaggggcgttttcgacatcccgagggtcaatccgcttgaggacgggggcgacttggacgcaccactcgattccacggatcctcgtcctgaaacgcgagcttccaagcctgaagggcccatctccgatctcaccacactcgttctgcggaacaccgtcaacttccggcaaacacgttgccacgcaggtacagccgggtctgaatccatcaaccagaccatcagagcgcagtaatctgccattcatgcgactcacgcggctactgggaaaaatcccgtttagcctcgtgtcaatcgtcacactcaagtgagatagaatccggctcaaggcaggtttcaacgttggggatgcagtctggctgtacatcccaaaagtgcagccgggtctgagtcgcaagttggcccacttgtggcatggcccattcaggatcgccgaagtggttggcgagttccgagtaaggctcaaggtcgaggacacgggctaccgcgtaaacccttgggttcatatcagccgactgaaaccccgggcgttgtatcccagacggcctataatccaaccggagatcgaagatgacgatgacacagtactccctcccgaggacagttaggaagcggacaacgagcatgacgagtacgaagtggagaagatcatcggacgtccaaacgggcacgagagtatctcatcaaatggaaggggtacgatgagcctgaatggataccgatggcacagctgaattgcggagcgctcttgtatgagttcaatcaaggggcgaaagcccgagcgcggttccaagccatgcaggctggggacgaccaccctaacatacaatagttgggggcggccaagtccgaatggggcaatcccaattgggagtgttgatcccagttggagattcccaggcggagacccgaaatgcctggatgtgaatatgtgaattacggaaaaattgattgtgaatttgtatggagcggatctacgatggagttgtgactacggagggtaacctgagcggaatcgtttggatacgctgtaccattggctacgacggttgcgtttgaccaatctaaccacgcatacacagttgcctacaatggactatcttcagtagtccaacaaattggacctatcaactcggcttccatgatttacggagttggcattacttctggttacatgaagaatactacatccactggctatcaatggtacaacagctctaaaaaggaagagcacttgagcagtagttggcaaaatgcaaagtgattcgattcaggtccttagttcgcaaccgcgtgctacctctaagcctgctactggatacctcttactggatacaccctactggattctctactggatacacagttaccttatccaatcagagaacgccacgtcgatgcccatcttgtacccacaatcttggcgtaatcaccgtgacgtaatcatcgtcccgtaatcacctgaatgatttcggtaccacacagtgaaggtcacgccgacctctctgatgacgcgttcgcgtcacacagtcgcttggcgaggcgtcgtcacatcagtcttgacaacactcccactcgactcgtcagcgaccacgatgcccagcttcgtcctgagcgcgtcgaactgcggcgccgcgatcggcttcgtcatgatgtccgccagcatgtcgagtgtcgaaacatactgcaacaccacttgaccgtcttccaccttctcgcgcacgaagtggtagcgaatgtcgatgtgctnnnnnnnnnnnnnnnnnnnnnnnnnnnnnnnnnnnnnnnnnnnnnnnnnnnnnnnnnnnnnnnnnnnnnnnnnnnnnnnnnnnnnnnnnnnnnnnnnnnnnnnnnnnnnnnnnnnnnnnnnnnnnnnnnnnnnnnnnnnnnnnnnnnnnnnnnnnnnnnnnnnnnnnnnnnnnnnnnnnnnnnnnnnnnnnnnnnnnnnnnnnnnnnnnnnnnnnnnnnnnnnnnnnnnnnnnnnnnnnnnnnnnnnnnnnnnnnnnnnnnnnnnnnnnnnnnnnnnnnnnnnnnnnnnnnnnnnnnnnnnnnnnnnnnnnnnnnnnnnnnnnnnnnnnnnnnnnnnnnnnnnnnnnnnnnnnnnnnnnnnnnnnnnnnnnnnnnnnnnnnnnnnnnnnnnnnnnnnnnnnnnnnnnnnnnnnnnnnnnnnnnnnnnnnnnnnnnnnnnnnnnnnnnnnnnnnnnnnnnnnnnnnnnnnnnnnnnnnnnnnnnnnnnnnnnnnnnnnnnnnnnnnnnnnnnnnnnnnnnnnnnnnnnnnnnnnnnnnnnnnnnnnnnnnnnnnnnnnnnnnnnnnnnnnnnnnnnnnnnnnnnnnnnnnnnnnnnnnnnnnnnnnnnnnnnnnnnnnnnnnnnnnnnnnnnnnnnnnnnnnnnnnnnnnnnnnnnnnnnnnnnnnnnnnnnnnnnnnnnnnnnnnnnnnnnnnnnnnnnnnnnnnnnnnnnnnnnnnnnnnnnnnnnnnnnnnnnnnnnnnnnnnnnnnnnnnnnnnnnnnnnnnnnnnnnnnnnnnnnnnnnnnnnnnnnnnnnnnnnnnnnnnnnnnnnnnnnnnnnnnnnnnnnnnnnnnnnnnnnnnnnnnnnnnnnnnnnnnnnnnnnnnnnnnnnnnnnnnnnnnnnnnnnnnnnnnnnnnnnnnnnnnnnnnnnnnnnnnnnnnnnnnnnnnnnnnnnnnnnnnnnnnnnnnnnnnnnnnnnnnnnnnnnnnnnnnnnnnnnnnnnnnnnnnnnnnnnnnnnnnnnnnnnnnnnnnnnnnnnnnnnnnnnnnnnnnnnnnnnnnnnnnnnnnnnnnnnnnnnnnnnnnnnnnnnnnnnnnnnnnnnnnnnnnnnnnnnnnnnnnnnnnnnnnnnnnnnnnnnnnnnnnnnnnnnnnnnnnnnnnnnnnnnnnnnnnnnnnnnnnnnnnnnnnnnnnnnnnnnnnnnnnnnnnnnnnnnnnnnnnnnnnnnnnnnnnnnnnnnnnnnnnnnnnnnnnnnnnnnnnnnnnnnnnnnnnnnnnnnnnnnnnnnnnnnnnnnnnnnnnnnnnnnnnnnnnnnnnnnnnnnnnnnnnnnnnnnnnnnnnnnnnnnnnnnnnnnnnnnnnnnnnnnnnnnnnnnnnnnnnnnnnnnnnnnnnnnnnnnnnnnnnnnnnnnnnnnnnnnnnnnnnnnnnnnnnnnnnnnnnnnnnnnnnnnnnnnnnnnnnnnnnnnnnnnnnnnnnnnnnnnnnnnnnnnnnnnnnnnnnnnnnnnnnnnnnnnnnnnnnnnnnnnnnnnnnnnnnnnnnnnnnnnnnnnnnnnnnnnnnnnnnnnnnnnnnnnnnnnnnnnnnnnnnnnnnnnnnnnnnnnnnnnnnnnnnnnnnnnnnnnnnnnnnnnnnnnnnnnnnnnnnnnnnnnnnnnnnnnnnnnnnnnnnnnnnnnnnnnnnnnnnnnnnnnnnnnnnnnnnnnnnnnnnnnnnnnnnnnnnnnnnnnnnnnnnnnnnnnnnnnnnnnnnnnnnnnnnnnnnnnnnnnnnnnnnnnnnnnnnnnnnnnnnnnnnnnnnnnnnnnnnnnnnnnnnnnnnnnnnnnnnnnnnnnnnnnnnnnnnnnnnnnnnnnnnnnnnnnnnnnnnnnnnnnnnnnnnnnnnnnnnnnnnnnnnnnnnnnnnnnnnnnnnnnnnnnnnnnnnnnnnnnnnnnnnnnnnnnnnnnnnnnnnnnnnnnnnnnnnnnnnnnnnnnnnnnnnnnnnnnnnnnnnnnnnnnnnnnnnnnnnnnnnnnnnnnnnnnnnnnnnnnnnnnnnnnnnnnnnnnnnnnnnnnnnnnnnnnnnnnnnnnnnnnnnnnnnnnnnnnnnnnnnnnnnnnnnnnnnnnnnnnnnnnnnnnnnnnnnnnnnnnnnnnnnnnnnnnnnnnnnnnnnnnnnnnnnnnnnnnnnnnnnnnnnnnnnnnnnnnnnnnnnnnnnnnnnnnnnnnnnnnnnnnnnnnnnnnnnnnnnnnnnnnnnnnnnnnnnnnnnnnnnnnnnnnnnnnnnnnnnnnnnnnnnnnnnnnnnnnnnnnnnnnnnnnnnnnnnnnnnnnnnnnnnnnnnnnnnnnnnnnnnnnnnnnnnnnnnnnnnnnnnnnnnnnnnnnnnnnnnnnnnnnnnnnnnnnnnnnnnnnnnnnnnnnnnnnnnnnnnnnnnnnnnnnnnnnnnnnnnnnnnnnnnnnnnnnnnnnnnnnnnnnnnnnnnnnnnnnnnnnnnnnnnnnnnnnnnnnnnnnnnnnnnnnnnnnnnnnnnnnnnnnnnnnnnnnnnnnnnnnnnnnnnnnnnnnnnnnnnnnnnnnnnnnnnnnnnnnnnnnnnnnnnnnnnnnnnnnnnnnnnnnnnnnnnnnnnnnnnnnnnnnnnnnnnnnnnnnnnnnnnnnnnnnnnnnnnnnnnnnnnnnnnnnnnnnnnnnnnnnnnnnnnnnnnnnnnnnnnnnnnnnnnnnnnnnnnnnnnnnnnnnnnnnnnnnnnnnnnnnnnnnnnnnnnnnnnnnnnnnnnnnnnnnnnnnnnnnnnnnnnnnnnnnnnnnnnnnnnnnnnnnnnnnnnnnnnnnnnnnnnnnnnnnnnnnnnnnnnnnnnnnnnnnnnnnnnnnnnnnnnnnnnnnnnnnnnnnnnnnnnnnnnnnnnnnnnnnnnnnnnnnnnnnnnnnnnnnnnnnnnnnnnnnnnnnnnnnnnnnnnnnnnnnnnnnnnnnnnnnnnnnnnnnnnnnnnnnnnnnnnnnnnnnnnnnnnnnnnnnnnnnnnnnnnnnnnnnnnnnnnnnnnnnnnnnnnnnnnnnnnnnnnnnnnnnnnnnnnnnnnnnnnnnnnnnnnnnnnnnnnnnnnnnnnnnnnnnnnnnnnnnnnnnnnnnnnnnnnnnnnnnnnnnnnnnnnnnnnnnnnnnnnnnnnnnnnnnnnnnnnnnnnnnnnnnnnnnnnnnnnnnnnnnnnnnnnnnnnnnnnnnnnnnnnnnnnnnnnnnnnnnnnnnnnnnnnnnnnnnnnnnnnnnnnnnnnnnnnnnnnnnnnnnnnnnnnnnnnnnnnnnnnnnnnnnnnnnnnnnnnnnnnnnnnnnnnnnnnnnnnnnnnnnnnnnnnnnnnnnnnnnnnnnnnnnnnnnnnnnnnnnnnnnnnnnnnnnnnnnnnnnnnnnnnnnnnnnnnnnnnnnnnnnnnnnnnnnnnnnnnnnnnnnnnnnnnnnnnnnnnnnnnnnnnnnnnnnnnnnnnnnnnnnnnnnnnnnnnnnnnnnnnnnnnnnnnnnnnnnnnnnnnnnnnnnnnnnnnnnnnnnnnnnnnnnnnnnnnnnnnnnnnnnnnnnnnnnnnnnnnnnnnnnnnnnnnnnnnnnnnnnnnnnnnnnnnnnnnnnnnnnnnnnnnnnnnnnnnnnnnnnnnnnnnnnnnnnnnnnnnnnnnnnnnnnnnnnnnnnnnnnnnnnnnnnnnnnnnnnnnnnnnnnnnnnnnnnnnnnnnnnnnnnnnnnnnnnnnnnnnnnnnnnnnnnnnnnnnnnnnnnnnnnnnnnnnnnnnnnnnnnnnnnnnnnnnnnnnnnnnnnnnnnnnnnnnnnnnnnnnnnnnnnnnnnnnnnnnnnnnnnnnnnnnnnnnnnnnnnnnnnnnnnnnnnnnnnnnnnnnnnnnnnnnnnnnnnnnnnnnnnnnnnnnnnnnnnnnnnnnnnnnnnnnnnnnnnnnnnnnnnnnnnnnnnnnnnnnnnnnnnnnnnnnnnnnnnnnnnnnnnnnnnnnnnnnnnnnnnnnnnnnnnnnnnnnnnnnnnnnnnnnnnnnnnnnnnnnnnnnnnnnnnnnnnnnnnnnnnnnnnnnnnnnnnnnnnnnnnnnnnnnnnnnnnnnnnnnnnnnnnnnnnnnnnnnnnnnnnnnnnnnnnnnnnnnnnnnnnnnnnnnnnnnnnnnnnnnnnnnnnnnnnnnnnnnnnnnnnnnnnnnnnnnnnnnnnnnnnnnnnnnnnnnnnnnnnnnnnnnnnnnnnnnnnnnnnnnnnnnnnnnnnnnnnnnnnnnnnnnnnnnnnnnnnnnnnnnnnnnnnnnnnnnnnnnnnnnnnnnnnnnnnnnnnnnnnnnnnnnnnnnnnnnnnnnnnnnnnnnnnnnnnnnnnnnnnnnnnnnnnnnnnnnnnnnnnnnnnnnnnnnnnnnnnnnnnnnnnnnnnnnnnnnnnnnnnnnnnnnnnnnnnnnnnnnnnnnnnnnnnnnnnnnnnnnnnnnnnnnnnnnnnnnnnnnnnnnnnnnnnnnnnnnnnnnnnnnnnnnnnnnnnnnnnnnnnnnnnnnnnnnnnnnnnnnnnnnnnnnnnnnnnnnnnnnnnnnnnnnnnnnnnnnnnnnnnnnnnnnnnnnnnnnnnnnnnnnnnnnnnnnnnnnnnnnnnnnnnnnnnnnnnnnnnnnnnnnnnnnnnnnnnnnnnnnnnnnnnnnnnnnnnnnnnnnnnnnnnnnnnnnnnnnnnnnnnnnnnnnnnnnnnnnnnnnnnnnnnnnnnnnnnnnnnnnnnnnnnnnnnnnnnnnnnnnnnnnnnnnnnnnnnnnnnnnnnnnnnnnnnnnnnnnnnnnnnnnnnnnnnnnnnnnnnnnnnnnnnnnnnnnnnnnnnnnnnnnnnnnnnnnnnnnnnnnnnnnnnnnnnnnnnnnnnnnnnnnnnnnnnnnnnnnnnnnnnnnnnnnnnnnnnnnnnnnnnnnnnnnnnnnnnnnnnnnnnnnnnnnnnnnnnnnnnnnnnnnnnnnnnnnnnnnnnnnnnnnnnnnnnnnnnnnnnnnnnnnnnnnnnnnnnnnnnnnnnnnnnnnnnnnnnnnnnnnnnnnnnnnnnnnnnnnnnnnnnnnnnnnnnnnnnnnnnnnnnnnnnnnnnnnnnnnnnnnnnnnnnnnnnnnnnnnnnnnnnnnnnnnnnnnnnnnnnnnnnnnnnnnnnnnnnnnnnnnnnnnnnnnnnnnnnnnnnnnnnnnnnnnnnnnnnnnnnnnnnnnnngtttgcacgcagtataaaccacacccaatcatagtttcaatactttagttattacttcaaagtaagtaaacacgtaggtcactacactgtagtaaggcatgtccgtgacaatgtagctcgcctcgcagaaacgggtaatcaataatacagcggcaacgatattcagctcatattgagggttgctggtcttgggtagttgtacccattaaccggttaacccgaaccggtccaatccgaacccacgttgattatggtgattacggtaagttgtttacgccaccgatgattagacgagtaggatgattggatgaacaccggtgagtgatggttgattagatgcactaggtgataggacgcagggtcgcgtgtctataacagtagggtgtaagctccaacaattcaatcactttcgaatcttcattctacccctcaagtgccttcgctccggtcccgccgtctgcgacgtccctccctccgcttcgtccgagcttcgtgtccaagatccataccttccatcaggttatgagcccaagcaccatgtcctctgcccaagacgcctcgaccaaggtctccattgacaagttcaacggggacaactacgcgacgtggaaccgctacatgcgtggcgtgttcctgaccaagtcgacgtggcatgtcgtgaaccgcgagacgacgccgagcttcacggactcgcgggccaaggacgactacgtcaagtcgagcaacatcgcgttcggactgatgttgctccacatggacgcggactaccaccatgtggtcgacgactgcgaggaagcgtgggttgcgtggacgcgcctgaagacgctgtacggtggttcgcagaaggctggacgcatctacctgaagcgccaactcttcagcatggagatgtcggaaggcggcaacgtcttgcatcattgcaacgaggtcctcaacatcagcgccaagctcagcagcatcggcgccaagatggaggatgaggacgtggcgatctgcctgttgcgcagcctccccaagagctacgagaacgtcgtgctgaacttggagatgagcagcgctgaactacgatcgcaagacgtcgtgaaggtgctgacgaatgagacaaggcgagaagacggcgacggtgaagacggagaatgcggccaaggcgttcaacaccgaccgagagtctcgccagtgtacgtactgcgggaaattggggcacacgattgacaaatgctggaccaagcagaaggacgagaatcggggcccaagacgcggcggcaatggcaatggccgtggacgcggggccaacaatgcccagtggaggaacgacgacgccagctacaactacgactacggctatgatcgagtggcgttcgcggtctcactggagtgtggcatttcgacgggcaagaatgtgtccgggttgtgggcggtcgacagcggcgcaacgcaccacatctgcaacgacaaggccaagttcgctcatttgattgagcggaatgaaggcgaactttcggtggccgacggcaacaaggcggccatcatgggtgtggggaccatcgtggaacgagtggttctgcccaacggcgacgagcgcgacatcgagatcaagaacgcgctgtacgtcccaagcatgagcaagaatctgctttcggtgccacagatcaacaagagtggtctgttccaagtcgtgttcgacagcaccaagatgcagattgcgcacaagggctccaagcaagtggtggcgacggcaaacctcgtggatggactctactggctccagacgcctcagcgatcggcgaatgcggcgaccagtgggaagacggtcgacttacacgcgcgtatgggtcacgctccggtggaggtgcttcgcaagatggtcgacaacaacatgatcaaggacgcgaaggcaccttccaagtcgagtggaccaagcgtgtgtcgcggctgccagcaagggaaaatggtccagaagccgttcccaagcaaccgtgacaagcgtcactacgacacgttcgagctgctccacttcgacgtgtgcggccccatggaagaagagtcactgggtggcagcaagtatctgctgctgatcgtggacgaagccagcggatgcatgaaggggttctgcctgcgtgccaagtcggagagcgaggactgcatcaagatgtacgtcacgaaggtgcagacgcagttcggcaagaaggtcaagtttgtgcggcacgacggagcccgtgagttcgcgaccaactcgctcaaggccttctacgaagtcgaaggcatcgagcagcaaaccacggttccgtacgcgcaccagaccaacggcacggcagaacgcgccatccggaccatcgtcacgattggccgcagcatgctgcatcacgccaagctggacaagagcttctgggctgaggcggccatgacagccatctacttgaagaatcgtctgccatcacccaagatcgaacacaagactccgttcgagatcgtttacaagtccaagccgagtgtgaagcacatgcgtgtgttcggataccagacgtacatcctgacgccgaaggaaagacggcgcaagtgggaccccaaggctcgcgccgggctgttcctcggctacgaagaagtgtccaaggcgtatcgagtttatgacatcgaggcggggcaggtggttatcagtcgcgatgtcaacttcaatgagtcgacctttggactttcgacgcatacttcggatgaagacgtcgatgatgctgtgttggacttggacgcgctggacctggacgacaacgatggaccgcgccaaacgagcttcaagcaggcggggaagcgcaagtaccgaccgagtggcgacgacaacactgccagaagatcgcgccccgttcgccaccgagctggcttagaagaagcaagtgcgccggacgtatcctcctcgcgccgagccgaccccgacgaagaagaaaagtctggggaccaagatgaagacgacgactcgacgcctccagtgttttggcgtgccagtgccaacgctgtggaagcagcagccgatctatcggagccgacgacgttccaagaggctgtgaacggtcctgatcaagtgcactggcgcaaagcgatccgcgcggagctctagtcgatgcgactgcgtggtgtttttcgagctgccaagttgcctaacggacaacgcgccatcgataccaagtgggtgttcaagatcaagcgcaaagcggacggctcgatcgagaagtacaaggcgcgcctcgtggccaagggcttcaagcagaagtacggcattgactacaccgagacgttctcgcccgtggtcaagtatgtgacgctgcgcatggtgatcgcgattgctaagtattttggctggcccctcgaccaactcgacgtggtgacagcattcctgtacgggataatgaaggaggtggtcttctgcgtggttccggaaggcgtcgaactggatggtgacttcgactgcctggaactggtgaaggccatctacggtctcaagcaagcttcgcgagtgtggaacgagaccttcgacgagttcgtgtgctccatcggcttccaagtgtcggccttcgatccgtgcctctacatcaaggtggtggacggtcactgcgtgcttgtactggtgtacgtggatgacgtactgattaccgggagttcgcccgagctgatcgcacgcacgaagaccgacctgaagacgcgcttcgagatgaccgacagcggcaagtgcgcgtttgttcttgggatcgagttggtggacggcccggacggcagcgtgaccatgtgccagcggcgatacgtggacgacatcctgaagcgcttcgccatggacgagtgcaaggccgtggtgagtccggtggacatgagcactcgactggttccaagcgacgcggcgaccaaggtgaacgctccgtttcgcgaagctgttggtgctctgatgcacttgatgaccgccacgcgcccagacatcgcgtacgccgttggctatgtatcgcgcttcatggagaacccccaagaggaacactgggttgcggtcaagcgtatctttcgctacctgcaaggcaccaaaacgcatgggatctgcttcaagccgggcgacaagatcgactttcgtggctactcggatgcggactgggccggcgacctcgccgaccgcaagtccacttcaggctacacgttcatgctcatgagtacgcctgtgagctggggaagcaagaagcaatgaagcggagtacatcgcgctcagtctggctatccaagaaggcaagtggattcatcgcctgctatgcgagattctggcggccgctaatgagactggacccgaactcatgatccgcgaagacaaccagtcgtgcatcaagatgacgaagaacccagtgaaccacggtcgcgccaagcacatcgacatcaagtaccaccacatccgcgatgaagtcaagcgcggcgaagtcaagctccagtactgcgagacttctgtgatgctagcggacatcatgacgaaggcgcttgcgggaccacgccacacggatctgacggtggctctcggcattcgtgggacttcgcattgagggggcgtattgagggttgctggtcttgggtactgtgtaccagttgtacccattaaccggttaacccgaaccggtccaatccgaacccacgttgattatggtgattacggtaagttgtttacgccaccgatgattagacgagtaggatgattggatgaacaccggtgagtgatggttgattagatgcactaggtgataggacgcagggtcgcgtgtctataacagtagggtgtaagctccaacaattcaatcactttcgaatcttcattctacccctcaagtgccttcgctccggtcccgccgtctgcgacgtccctccctccgcttcgtccgagcttcgtgtccaagatccataccttccatcaatcatcgaggccagattttaccgcccagtagagctgcttcctatcctgcacgctcctgtcgtgcgagagcgaattagtatcgtggagatgctgcttgacaccatagaacaagatgagtacaagcaaatattgcgggatgagctgagtagaggccaacttggtggagtggaaagaacttacgcgcaaaagttcttcaatgaaccggatattgctggacgcatgatgatggtgcatttgcattcggcaagcgaatggtttatacagtggatggctcttcgtgttcgagacacctgatggaaggtatggatcttggacacgaagctcggacgaagcggagggagggacgtcgcagacggcgggaccggagcgaaggcacttgaggggtagaatgaagattcgaaagtgattgaattgttggagcttacaccctactgttatagacacgcgaccctgcgttctatcacctagtgcatctaatcaaccatcactcaccggtgttcatccaatcatcctactcgtctaatcatcggtggcgtaaacaacttaccgtaatcaccataatcaacgtgggttcggattggaccggttcgggttaaccggttaatgggtacaactggtacacagtacccaagaccagcaaccctcaatacgccccctcaatgcgaagtcccacgaatgccgagagccaccgtcagatccgtgtggcgtggtcccgcaagcgccttcgtcatgatgtccgctagcatcacagaagtctcgcagtactggagcttgacttcgccgcgcttgacttcatcgcggatgtggtggtacttgatgtcgatgtgcttggcgcgaccgtggttcactgggttcttcgtcatcttgatgcacgactggttgtcttcgcggatcatgagttcgggtccagtctcattagcggccgccagaatctcgcatagcaggcgataaatccacttgccttcttggatagccagactgagcgcgatgtactccgcttcattgcttcttgcttccccagctcacaggcgcactcatgagcatgaacgtgtagcctgaagtggacttgcggtcggcgaggtcgccggcccagtccgcatccgagtagccacgaaagtcgatcttgtcgcccggcttgaagcagatcccatgcgttttggtgccttgcaggtagcgaaagatacgcttgaccgcaacccagtgttcctcttgggggttctccatgaagcgcgatacatagccaacggcgtacgcgatgtctgggcgcgtggcggtcatcaagtgcatcagagcaccaacagcttcgcgaaacggagcgttcaccttggtcgccgcgtcgcttggaaccagtcgagtgctcatgtccaccggactcaccacggccttgcactcgtccatggcgaagcgcttcaggatgtcgtccacgtatcgccgctggcacatggtcacgctgccgtccgggccgtccaccaactcgatcccaagaacaaacgcgcacttgccgctgtcggtcatctcgaagcgcgtcttcaggtcggtcttcgtgcgtgcgatcagctcgggcgaactcccggtaatcagtacgtcatccacgtgcaccagtacaagcacgcagtgaccgtccaccaccttgatgtagaggcacggatcgaaggccgacacttggaagccgatggagcacacgaactcgtcgaaggtctcgttccacactcgcgaagcttgcttgagaccgtagatggccttcaccagttccaggcagtcgaagtcaccatccagttcgacgccttccggaaccacgcagaagaccacctccttcattatcccgtacaggaatgctgtcaccacgtcgagttggtcgaggggccagccaaaatacttagcaatcgcgatcaccatgcgcagcgtcacatacttgaccacgggcgagaacgtctcggtgtagtcaatgccgtacttctgcttgaagcccttggccacgaggcgcgccttgtacttctcgatcgagccgtccgctttgcgcttgatcttgaacacccacttggtatcgatggcgcgttatccgttaggcaacttggcagctcgaaacacaccacgcagtcgcatcgacttgagctccgcgcggatcgctttgcgccagtgcacttgatcaggaccgttcacagcctcttggaacgtcgtcggctccgatagatcggctgctgcttccacagcgttggcactggcacgccaaaacactggaggcgtcgagtcgtcgtcttcatcttggtccccagacttttcttcttcgtcggggtcggctcggcgcgaggaggatacgtccggcgcacttgcttcttctaagccagctcggtggcgaacggggcgcgatcttctggcagtgttgtcgtcgccactcggtcggtacttgcgcttccccgcctgcttgaagctcgtttggcgcggtccatcgttgtcgtccaggtccagcgcgtccaagtccagcacagcatcatcgacgtcttcatccgaagtatgcgtcgaaagtccaaaggtcgactcatcgaagttgacatcgcgactgataaccacctgccccgcctcgatgtcataaactcgatacgccttggacacttcttcgtagccgaggaacagcccggcgcgagccttggggtcccacttgcgccgtctttccttcggcgtcagtatgtacgtctggcatccgaacacacgcatgtgcttcacactcggcttggacttgtaaacgatctcgaacggagtcttgtgttcgatcttgggtgatggcagacgattcttcacgtagatggctgtcatggccgcctcagcccagaagctcttgtccagcttggcgtgatgcagcatgctgcggccaatcgtgacgatggtccggatggcgcgttctgccgtgccgttggtctggtgcgcgtacggaaccgtggtttgctgctcgatgccttcgacttcgtagaaggccttgagcgagttggtcgcgaactcacgggctccgtcgtgccgcacaaacttgaccttcttgccgaactgcgtctgcaccttcgtgacgtacatcttgatgcagtcctcgctctccgacttggcacgcaggcagaaccccttcatgcatccgctggcttcgtccacgatcagcagcagatacttgctgccacccagtgactcttcttccatggggccgcacacgtcgaagtggagcagctcgaacgtgtcgtagtgacgcttgtcacggttgcttgggaacggtttctggaccattttcccttgctggcagccgcgacacacgcttggtccactcgacttggaaggtgccttcgcgtccttgatcatgttgttgtcgaccatcttgcgaagcacctccaccggagcgtgacccatacgcgcgtgtaagtcgaccgtcttcccactggtcgccgcattcgccgatcgctgaggcgtctggagccagtagagtccatccacgaggtttgccgtcgccaccacttgcttggagcccttgtgcgcaatctgcatcttggtgctgtcgaacacgacttggaacagaccactcttgttgatctgtggcaccgaaagcagattcttgctcatgcttgggacgtacagcgcgttcttgatctcgatgtcgcgctcgtcgccgttgggcagaaccactcgttccacgatggtccccacacccatgatggccgccttgttgccgtcggccaccgaaagttcgccttcattccgctcaatcaaatgagcgaacttggccttgtcgttgcagatgtggtgcgttgcgccgctgtcgaccgcccacaacccggacacattcttgcccgtcgaaatgccacactccagtgagaccgcgaacgccactcgatcatagccgtagtcgtagttgtagctggcgtcgtcgttcctccactgggcattgttggccccgcgtccacggccattgccattgccgccgcgtcttgggccccgattctcgtccttctgcttggtccagcacttgtcaatcgtgtgccccaatttcccgcagtacgtacactggcgagactctcggtcggtgttgaacgccttggccgcattctccgtcttcaccgtcgccgtcttctcgccttgtctcttgatgtgctcattcgtcagcaccttcacgacgtcttgcgatcgtagttcagcgctgctcatctccaagttcagcacgacgttctcgtagctcttggggaggctgcgcaacaggcagatcgccacgtcctcatcctccatcttggcgccgatgctgctgagcttggcgctgatgttgaggacctcgttgcaatgatgcaagacgttgccgccttccgacatctccatgctgaagagttggcgcttcaggtagatgcgtccagccttctgcgaaccaccgtacagcgtcttcaggcgcgtccacgcaacccacgcttcctcgcagtcgtcgaccacatggtggtagtccgcgtccatgtggagcaacatcagtccgaacgcgatgttgctcgacttgacgtagtcgtccttggcccgcgagtccgtgaagctcggcgtcgtctcgcggttcacgacatgccacgtcgacttggtcaggaacacgccacgcaagtagcggttccacgtcgcgtagttgtccccgttgaacttgtcaatggagaccttggtcgaggcgtcttcggcagaggacatggtgcttgggctcataacctgatggaaggtatggatcttggacacgaagctcggacgaagcggagggagggacgtcgcagacggcgggaccggagcgaaggcacttgaggggtagaatgaagattcgaaagtgattgaattgttggagcttacaccctactgttatagacacgcgaccctgcgtcctatcacctagtgcatctaatcaaccatcactcaccggtgttcatccaatcatcctactcgtctaatcatcggtggcgtaaacaacttaccgtaatcaccataatcaacgtgggttcggattggaccggttcgggttaaccggttaatgggtacaactggtacacagtacccaagaccagcaaccctcaataccgccctcatcccattgttccactcatttttgatttggcatggccttccacgtcgaagccttccagcacttcctggagctgcgcgaaaaagcgcaagcatggcgggagtttgagacgcagctgagcacacttgagccccgtgatgaagcgttcgtacgcgagatgctgatgcggccagccgtgtcgcaatgcatcgatcgtggctacgagagaagcctttacgatgcatacgtcgaaggcagagcaagagttcaagcaggccttgtgctggtcggttcgcccccttcagatcaagaagagcactagttccagacgccgccagcaagcccgtacaatgcgcaagattcatcgacaccgcttccagaagcgcgtataccgctcagctacgcggaactctgcgcactgacgccacccgcctcgcctgccatccactaccacaattggatcccatcatcgtccgtggcgtggtcgccaaaatcaccgacgccttcgcagatggatgaactggatcaggtgatgcaacaaacgcgcgagagggagaaaaaagatacacgtaccaggaagcgcaagcgccaccagccatatattctggtgaggcgctaaagatgaggcccacggatccgccaagaacccgttctagcaaggatacattttgattggttaatgtcaatatatccagtccgattctagccagttgaattgcatagtgtcacgtctcaggcacgccagaggtgacacgtgtacgttcatatggaagaaaccgcggcggtagcacattggctttgtaaccaccaactatgttgcccggagggttgaagctattctgggatctggatcgtatgcatatccaatcccatactgagtagtatcgcgccaacaaagttgcgtaaaatgttttgtatttggggaagggccatcggaactgaaatcatactcgtagccttctgaataccaggcatcgattgttttctttatgattttacatgggtcgttttggtatcctttaaggaatcctaaattctcaccgtacagaggggtttccagaatgtttgaagtcttttgtcctaatcaaaggtggctgcatagttctgtggaaatgcagcgatgtgtttgttataattaagagtcttcgtattgtgtcgcgttcgatgcagattgatataatgagtggcatttactaattgcacatgattaagctcgcacgtttgtggcattatcgatctatatttatacgatcattatatcttacaaaagacgcctcactaatcaaaacaacatgaatacgcactgatctaaaattttcaccaaatgcaatgaaagattatatgcatgtacaatgccagccaaatgtttattgcaatccgcaagagcttgtattatctcacgatcaattgcgtccatatcgcgtatcaatatccgatgatactggctgcttgggggatacgcctgaactttatcaagataacgacgatgcgtatagaataaccatgttaggcgagtaaaggttttgtatctaccttgttattgttgtcaagactgatgtgacgacgcctcgccaagcgaccgtgtgacgcgaacgcgtcatcagtgaagtcggcgtgaccttcactgtgttgtaccgcaatcattcaggtgattacgggacggtgattacgccaagattgtgggtacaagatgggcaccgacgtggcgttctctgattggataaggtaactgtgtatccagtagagaatccagtagggtgtatccagtaagaggtatccagtagcaggcttagaggtagcacgcggttgcgaactaaggacctgaatcgaatcactttgcattttgccaactactgctcaagtgttcttccttttaaaatgttttgtatttggggaagggccatcggaactgaaatcatacttgtagacttctgaataccaggcatcgattgttttctttatgattttacatgggtcgtttttgtatcctttaaagaatcctaaattctcaccgtacagaggggtttccagaatgtttgaagtcttttgtcctaatcaaaggtggctgcatagttctgtggaaatgcagcgatgtgtttgttataattaagagtcttcgtattgtgtcgcgttcgatgcagattgatataatgagtggcatttactaattgcacatgattaagctcgcacgtttgtggcattatcgatctatatttatacgatcattatatcttacaaaagacgcctcactaatcaaaacaacatgaatacgcactgatctaaaattttcaccaaatgcaatgaaagattatatgcatgtacaatgccagccaaatgtttattgcaatccgcaagagcttgtattatctcacgatcaattgcgtccatatcgcgtatcaatatccgatgatactggctgcttgggggatacgcctgaactttatcaagataacgacgatgcgtatagaataaccatgttaggcgagtaaaggttttgtatctaccttgttattgttgtcaagactgatgtgacgacgcctcgccaagcgaccgtgtgacgcgaacgcgtcatcagtgaagtcggcgtgaccttcactgtgttgtaccgcaatccttcaggtgattacgggacggtgattacgccaagattgtgggtacaagatgggcaccgacgtggcgttctctgattggataaggtaactgtgtatccagtagagaatccagtagggtgtatccagtaagaggtatccagtagcaggcttagaggtagcacgcggttgcgaactaaggacctgaatcgaatcactttgcattttgccaactactgctcaagtgttcttccttttaaaatgttttgtatttggggaagggccatcggaactgaaatcatacttgtagacttctgaataccaggcatcgattgttttctttatgattttacatgggtcgttttggtatcctttaaggaatcctaaattctcaccgtacagaggggtttccagaatgtttgaagtcttttgtcctaatcaaaggtggctgcatagttctgtggaaatgcagcgatgtgtttgttataattaagagtcttcgtattgtgtcgcgttcgatgcagattgatataatgagtggcatttactaattgcacatgattaagctcgcacgtttgtggcattatcgatctatatttatacgatcattatatcttacaaaagacgcctcacaaatcaaaacaacatggatacgcactgatctaaaattttcaccaaatgcaatgaaagattatatgcatgtacaatgccagccaaatgtttattgcaatccgcaagagcttgtattatctcacgatcaattgcttccatatcgcgtatcaatatccgatgatactggctgcttgggggatacgcctgaactttatcaagataacgacgatgcgtatagaataaccatgttaggcgagtaaaggttttgtatctaccttgttattgttgtcaagactgatgtgacgacgcctcgccaagcgaccgtgtgacgcgaacgcgtcatcagtgaagtcggcgtgaccttcactgtgttgtaccgcaatcattcaggtgattacgggacggtgattacgccaagattgtgggtacaagatgggcaccgacgtggcgttctctgattggataaggtaactgtgtatccagtagagaatccagtagggtgtatccagtaagaggtatccagtagcaggcttagaggtagcacgcggttgcgaactaaggacctgaatcgaatcactttgcattttgccaactactgctcaagtgttcttccttttaaaatgttttgtatttggggaagggccatcggaactgaaatcatacttgtagacttctgaataccaggcatcgattgttttctttatgattttacatgggtcgtttttgtatcctttaaagaatcctaaattctcaccgtacagaggggtttccagaatgtttgaagtcttttgtcctaatcaaaggtggctgcatagttctgtggaaatgcagcgatgtgtttgttataattaagagtcttcgtattgtgtcgcgttcgatgcagattgatataatgagtggcatttactaattgcacatgattaagctcgcacgtttgtggcattatcgatctatatttatacgatcattatatcttacaaaagacgcctcactaatcaaaacaacatggatacgcactgatctaaaattttcaccaaatgcaatgaaagattatatgcatgtacaatgccagccaaatgtttattgcaatccgcaagagcttgtattatctcacgatcaattgcttccatatcgcgtatcaatatccgatgatactggctgcttgggggatacgcctgaactttatcaagataacgacgatgcgtatagaataaccatgttaggcgagtaaaggttttgtatctaccttgttattgttgtcaagactgatgtgacgacgcctcgccaagcgaccgtgtgacgcgaacgcgtcatcagtgaagtcggcgtgaccttcactgtgttgtaccgcaatcattcaggtgattacgggacggtgattacgccaagattgtgggtacaagatgggcaccgacgtggcgttctctgattggataaggtaactgtgtatccagtagagaatccagtagggtgtatccagtaagaggtatccagtagcaggcttagaggtagcacgcggttgcgaactaaggacctgaatcgaatcactttgcattttgccaactactgctcaagtgttcttccttttaaaatgttttgtatttggggaagggccatcggaactgaaatcatacttgtagacttctgaataccaggcatcgattgttttctttatgattttacatgggtcgttttggtatcctttaaggaatcctaaattctcaccgtacagaggggtttccagaatgtttgaagtcttttgtcctaatcaaaggtggctgcatagttctgtggaaatgcagcgatgtgtttgttataattaagagtcttcgtattgtgtcgcgttcgatgcagattgatataatgagtggcatttactaattgcacatgattaagctcgcacgtttgtggcattatcgatctatatttatacgatcattatatcttacaaaagacgcctcactaatcaaaacaacatgaatacgcactgatctaaaattttcaccaaatgcaatgaaagattatatgcatgtacaatgccagccaaatgtttattgcaatccgcaagagcttgtattatctcacgatcaattgcgtccatatcgcgtatcaatatccgatgatactggctgcttgggggatacgcctgaactttatcaagataacgacgatgcgtatagaataaccatgttaggcgagtaaaggttttgtatctaccttgttattgttgtcaagactgatgtgacgacgcctcgccaagcgaccgtgtgacgcgaacgcgtcatcagtgaagtcggcgtgaccttcactgtgttgtaccgcaatcattcaggtgattacgggacggtgattacgccaagattgtgggtacaagatgggcaccgacgtggcgttctctgattggataaggtaactgtgtatccagtagagaatccagtagggtgtatccagtaagaggtatccagtagcaggcttagaggtagcacgcggttgcgaactaaggacctgaatcgaatcactttgcattttgccaactactgctcaagtgttcttccttttaaaatgttttgtatttggggaagggccatcggaactgaaatcatacttgtagacttctgaataccaggcatcgattgttttctttatgattttacatgggtcgtttttgtatcctttaaagaatcctaaattctcaccgtacagaggggtttccagaatgtttgaagtcttttgtcctaatcaaaggtggctgcatagttctgtggaaatgcagcgatgtgtttgttataattaagagtcttcgtattgtgtcgcgttcgatgcagattgatataatgagtggcatttactaattgcacatgattaagctcgcacgtttgtggcattatcgatctatatttatacgatcattatatcttacaaaagacgcctcactaatcaaaacaacatgaatacgcactgatctaaaattttcaccaaatgcaatgaaagattatatgcatgtacaatgccagccaaatgtttattgcaatccgcaagagcttgtattatctcacgatcaattgcgtccatatcgcgtatcaatatccgatgatactggctgcttgggggatacgcctgaactgtatcaagataacgacgatgcgtatagaataaccatgttaggcgagtaaaggttttgtatctaccttgttattgttgtcaagactgatgtgacgacgcctcgccaagcgaccgtgtgacgcgaacgcgtcatcagtgaagtcggcgtgaccttcactgtgttgtaccgcaatccttcaggtgattacgggacggtgattacgccaagattgtgggtacaagatgggcaccgacgtggcgttctctgattggataaggtaactgtgtatccagtagagaatccagtagggtgtatccagtaagaggtatccagtagcaggcttagaggtagcacgcggttgcgaactaaggacctgaatcgaatcactttgcattttgccaactactgctcaagtgttcttccttttaaaatgttttgtatttggggaagggccatcggaactgaaatcatacttgtagacttctgaataccaggcatcgattgttttctttatgattttacatgggtcgttttggtatcctttaaagaatcctaaattctcaccgtacagaggggtttccagaatgtttgaagtcttttgtcctaatcaaaggtggctgcatagttctgtggaaatgcagcgatgtgtttgttataattaagagtcttcgtattgtgtcgcgttcgatgcagattgatataatgagtggcatttactaattgcacatgattaagctcgcacgtttgtggcattatcgatctatatttatacgatcattatatcttacaaaagacgcctcacaaatcaaaacaacatggatacgcactgatctaaaattttcaccaaatgcaatgaaagattatatgcatgtacaatgccagccaaatgtttattgcaatccgcaagagcttgtattatctcacgatcaattgcttccatatcgcgtatcaatatccgatgatactggctgcttgggggatacgcctgaactttatcaagataacgacgatgcgtatagaataaccatgttaggcgagtaaaggttttgtatctaccttgttattgttgtcaagactgatgtgacgacgcctcgccaagcgaccgtgtgacgcgaacgcgtcatcagtgaagtcggcgtgaccttcactgtgttgtaccgcaatccttcaggtgattacgggacggtgattacgccaagattgtgggtacaagatgggcaccgacgtggcgttctctgattggataaggtaactgtgtatccagtagagaatccagtagggtgtatccagtaagaggtatccagtagcaggcttagaggtagcacgcggttgcgaactaaggacctgaatcgaatcactttgcattttgccaactactgctcaagtgttcttccttttaaaatgttttgtatttggggaagggccatcggaactgaaatcatacttgtagacttctgaataccaggcatcgattgttttctttatgattttacatgggtcgttttggtatcctttaaggaatcctaaattctcaccgtacagaggggtttccagaatgtttgaagtcttttgtcctaatcaaaggtggctgcatagttctgtggaaatgcagcgatgtgtttgttataattaagagtcttcgtattgtgtcgcgttcgatgcagattgatataatgagtggcatttactaattgcacatgattaagctcgcacgtttgtggcattatcgatctatatttatacgatcattatatcttacaaaagacgcctcactaatcaaaacaacatgaatacgcactgatctaaaattttcaccaaatgcaatgaaagattatatgcatgtacaatgccagccaaatgtttattgcaatccgcaagagcttgtattatctcacgatcaattgcgtccatatcgcgtatcaatatccgatgatactggctgcttgggggatacgcctgaactttatcaagataacgacgatgcgtatagaataaccatgttaggcgagtaaaggttttgtatctaccttgttattgttgtcaagactgatgtgacgacgcctcgccaagcgaccgtgtgacgcgaacgcgtcatcagtgaagtcggcgtgaccttcactgtgttgtaccgcaatccttcaggtgattacgggacggtgattacgccaagattgtgggtacaagatgggcaccgacgtggcgttctctgattggataaggtaactgtgtatccagtagagaatccagtagggtgtatccagtaagaggtatccagtagcaggcttagaggtagcacgcggttgcgaactaaggacctgaatcgaatcactttgcattttgccaactactgctcaagtgttcttccttttaaaatgttttgtatttggggaagggccatcggaactgaaatcatacttgtagacttctgaataccaggcatcgattgttttctttatgattttacatgggtcgtttttgtatcctttaaagaatcctaaattctcaccgtacagaggggtttccagaatgtttgaagtcttttgtcctaatcaaaggtggctgcatagttctgtggaaatgcagcgatgtgtttgttataattaagagtcttcgtattgtgtcgcgttcgatgcagattgatataatgagtggcatttactaattgcacatgattaagctcgcacgtttgtggcattatcgatctatatttatacgatcattatatcttacaaaagacgcctcactaatcaaaacaacatgaatacgcactgatctaaaattttcaccaaatgcaatgaaagattatatgcatgtacaatgccagccaaatgtttattgcaatccgcaagagcttgtattatctcacgatcaattgcgtccatatcgcgtatcaatatccgatgatactggctgcttgggggatacgcctgaactgtatcaagataacgacgatgcgtatagaataaccatgttaggcgagtaaaggttttgtatctaccttgttattgttgtcaagactgatgtgacgacgcctcgccaagcgaccgtgtgacgcgaacgcgtcatcagtgaagtcggcgtgaccttcactgtgttgtaccgcaatccttcaggtgattacgggacggtgattacgccaagattgtgggtacaagatgggcaccgacgtggcgttctctgattggataaggtaactgtgtatccagtagagaatccagtagggtgtatccagtaagaggtatccagtagcaggcttagaggtagcacgcggttgcgaactaaggacctgaatcgaatcactttgcattttgccaactactgctcaagtgttcttccttttaaaatgttttgtatttggggaagggccatcggaactgaaatcatacttgtagacttctgaataccaggcatcgattgttttctttatgattttacatgggtcgttttggtatcctttaaggaatcctaaattctcaccgtacagaggggtttccagaatgtttgaagtcttttgtcctaatcaaaggtggctgcatagttctgtggaaatgcagcgatgtgtttgttataattaagagtcttcgtattgtgtcgcgttcgatgcagattgatataatgagtggcatttactaattgcacatgattaagctcgcacgtttgtggcattatcgatctatatttatacgatcattatatcttacaaaagacgcctcactaatcaaaacaacatgaatacgcactgatctaaaattttgaccaaatgcaatgaaagattatatgcacgtacaatgccagccaaatgtttattgcaatccgcaagagcttgtattatctcacgatcaattgcgtccatatcgcgtatcaatatccgatgatactggctgcttgggggatacgcctgaactttatcaagataacgacgatgcgtatagaataaccatgttaggcgagtaaaggttttgtatctaccttgttattgttgtcaagactgatgtgacgacgcctcgccaagcgaccgtgtgacgcgaacgcgtcatcagtgaagtcggcgtgaccttcactgtgttgtaccgcaatcattcaggtgattacgggacggtgattacgccaagattgtgggtacaagatgggcaccgacgtggcgttctctgattggataaggtaactgtgtatccagtagagaatccagtagggtgtatccagtaagaggtatccagtagcaggcttagaggtagcacgcggttgcgaactaaggacctgaatcgaatcactttgcattttgccaactactgctcaagtgttcttccttttaaaatgttttgtatttggggaagggccatcggaactgaaatcatacttgtagacttctgaataccaggcatcgattgttttctttatgattttacatgggtcgttttggtatcctttaaagaatcctaaattctcaccgtacagaggggtttccagaatgtttgaagtcttttgtcctaatcaaaggtggctgcatagttctgtggaaatgcagcgatgtgtttgttataattaagagtcttcgtattgtgtcgcgttcgatgcagattgatataatgagtggcatttactaattgcacatgattaagctcgcacgtttgtggcattatcgatctatatttatacgatcattatatcttacaaaagacgcctcacaaatcaaaacaacatggatacgcactgatctaaaattttcaccaaatgcaatgaaagattatatgcatgtacaatgccagccaaatgtttattgcaatccgcaagagcttgtattatctcacgatcaattgcgtccatatcgcgtatcaatatccgatgatactggctgcttgggggatacgcctgaactttatcaagataacgacgatgcgtatagaataaccatgttaggcgagtaaaggttttgtatctaccttgttattgttgtcaagactgatgtgacgacgcctcgccaagcgaccgtgtgacgcgaacgcgtcatcagtgaagtcggcgtgaccttcactgtgttgtaccgcaatccttcaggtgattacgggacggtgattacgccaagattgtgggtacaagatgggcaccgacgtggcgttctctgattggataaggtaactgtgtatccagtagagaatccagtagggtgtatccagtaagaggtatccagtagcaggcttagaggtagcacgcggttgcgaactaaggacctgaatcgaatcactttgcattttgccaactactgctcaagtgttcttccttttaaaatgttttgtatttggggaagggccatcggaactgaaatcatacttgtagacttctgaataccaggcatcgattgttttctttatgattttacatgggtcgttttggtatcctttaaggaatcctaaattctcaccgtacagaggggtttccagaatgtttgaagtcttttgtcctaatcaaaggtggctgcatagttctgtggaaatgcagcgatgtgtttgttataattaagagtcttcgtattgtgtcgcgttcgatgcagattgatataatgagtggcatttactaattgcacatgattaagctcgcacgtttgtggcattatcgatctatatttatacgatcattatatcttacaaaagacgcctcactaatcaaaacaacatgaatacgcactgatctaaaattttcaccaaatgcaatgaaagattatatgcatgtacaatgccagccaaatgtttattgcaatccgcaagagcttgtattatctcacgatcaattgcttccatatcgcgtatgaatatccgatgatactggctgcttgggggatacgcctgaactttatcaagataacgacgatgcgtatagaataaccatgttaggcgagtaaaggttttgtatctaccttgttattgttgtcaagactgatgtgacgacgcctcgccaagcgaccgtgtgacgcgaacgcgtcatcagtgaagtcggcgtgaccttcactgtgttgtaccgcaatcattcaggtgattacgggacggtgattacgccaagattgtgggtacaagatgggcaccgacgtggcgttctctgattggataaggtaactgtgtatccagtagagaatccagtagggtgtatccagtaagaggtatccagtagcaggcttagaggtagcacgcggttgcgaactaaggacctgaatcgaatcactttgcattttgccaactactgctcaagtgttcttccttttaaaatgttttgtatttggggaagggccatcggaactgaaatcatacttgtagacttctgaataccaggcatcgattgttttctttatgattttacatgggtcgttttggtatcctttaaagaatcctaaattctcaccgtacagaggggtttccagaatgtttgaagtcttttgtcctaatcaaaggtggctgcatagttctgtggaaatgcagcgatgtgtttgttataattaagagtcttcgtattgtgtcgcgttcgatgcagattgatataatgagtggcatttactaattgcacatgattaagctcgcacgtttgtggcattatcgatctatatttatacgatcattatatcttacaaaagacgcctcactaatcaaaacaacatgaatacgcactgatctaaaattttcaccaaatgcaatgaaagattatatgcatgtacaatgccagccaaatgtttattgcaatccgcaagagcttgtattatctcacgatcaattgcttccatatcgcgtatcaatatccgatgatactggctgcttgggggatacgcctgaactttatcaagataacgacgatgcgtatagaataaccatgttaggcgagtaaaggttttgtatctaccttgttattgttgtcaagactgatgtgacgacgcctcgccaagcgaccgtgtgacgcgaacgcgtcatcagtgaagtcggcgtgaccttcactgtgttgtaccgcaatcattcaggtgattacgggacggtgattacgccaagattgtgggtacaagatgggcaccgacgtggcgttctctgattggataaggtaactgtgtatccagtagagaatccagtagggtgtatccagtaagaggtatccagtagcaggcttagaggtagcacgcggttgcgaactaaggacctgaatcgaatcactttgcattttgccaactactgctcaagtgttcttccttttaaaatgttttgtatttggggaagggccatcggaactgaaatcatacttgtagacttctgaataccaggcatcgattgttttctttatgattttacatgggtcgttttggtatcctttaaagaatcctaaattctcaccgtacagaggggtttccagaatgtttgaagtcttttgtcctaatcaaaggtggctgcatagttctgtggaaatgcagcgatgtgtttgttataattaagagtcttcgtattgtgtcgcgttcgatgcagattgatataatgagtggcatttactaattgcacatgattaagctcgcacgtttgtggcattatcgatctatatttatacgatcattatatcttacaaaagacgcctcactaatcaaaacaacatgaatacgcactgatctaaaattttcaccaaatgcaatgaaagattatatgcatgtacaatgccagccaaatgtttattgcaatccgcaagagcttgtattatctcacgatcaattgcgtccatatcgcgtatcaatatccgatgatactggctgcttgggggatacgcctgaactttatcaagataacgacgatgcgtatagaataaccatgttaggcgagtaaaggttttgtatctaccttgttattgttgtcaagactgatgtgacgacgcctcgccaagcgaccgtgtgacgcgaacgcgtcatcagtgaagtcggcgtgaccttcactgtgttgtaccgcaatcattcaggtgattacgggacggtgattacgccaagattgtgggtacaagatgggcaccgacgtggcgttctctgattggataaggtaactgtgtatccagtagagaatccagtagggtgtatccagtaagaggtatccagtagcaggcttagaggtagcacgcggttgcgaactaaggacctgaatcgaatcactttgcattttgccaactactgctcaagtgttcttccttttaaaatgttttgtatttggggaagggccatcggaactgaaatcatacttgtagacttctgaataccaggcatcgattgttttctttatgattttacatgggtcgttttggtatcctttaaggaatcctaaattctcaccgtacagaggggtttccagaatgtttgaagtcttttgtcctaatcaaaggtggctgcatagttctgtggaaatgcagcgatgtgtttgttataattaagagtcttcgtattgtgtcgcgttcgatgcagattgatataatgagtggcatttactaattgcacatgattaagctcgcacgtttgtggcattatcgatctatatttatacgatcattatatcttacaaaagacgcctcactaatcaaaacaacatgaatacgcactgatctaaaattttcaccaaatgcaatgaaagattatatgcatgtacaatgccagccaaatgtttattgcaatccgcaagagcttgtattatctcacgatcaattgcgtccatatcgcgtatcaatatccgatgatactggctgcttgggggatacgcctgaactttatcaagataacgacgatgcgtatagaataaccatgttaggcgagtaaaggttttgtatctaccttgttattgttgtcaagactgatgtgacgacgcctcgccaagcgaccgtgtgacgcgaacgcgtcatcagtgaagtcggcgtgaccttcactgtgttgtaccgcaatcattcaggtgattacgggacggtgattacgccaagattgtgggtacaagatgggcaccgacgtggcgttctctgattggataaggtaactgtgtatccagtagagaatccagtagggtgtatccagtaagaggtatccagtagcaggcttagaggtagcacgcggttgcgaactaaggacctgaatcgaatcactttgcattttgccaactactgctcaagtgttcttccttttaaaatgttttgtatttggggaagggccatcggaactgaaatcatacttgtagacttctgaataccaggcatcgattgttttctttatgattttacatgggtcgttttggtatcctttaaggaatcctaaattctcaccgtacagaggggtttccagaatgtttgaagtcttttgtcctaatcaaaggtggctgcatagttctgtggaaatgcagcgatgtgtttgttataattaagagtcttcgtattgtgtcgcgttcgatgcagattgatataatgagtggcatttactaattgcacatgattaagctcgcacgtttgtggcattatcgatctatatttatacgatcattatatcttacaaaagacgcctcactaatcaaaacaacatgaatacgcactgatctaaaattttcaccaaatgcaatgaaagattatatgcatgtacaatgccagccaaatgtttattgcaatccgcaagagcttgtattatctcacgatcaattgcgtccatatcgcgtatcaatatccgatgatactggctgcttgggggatacgcctgaactttatcaagataacgacgatgcgtatagaataaccatgttaggcgagtaaaggttttgtatctaccttgttattgttgtcaagactgatgtgacgacgcctcgccaagcgaccgtgtgacgcgaacgcgtcatcagtgaagtcggcgtgaccttcactgtgttgtaccgcaatcattcaggtgattacgggacggtgattacgccaagattgtgggtacaagatgggcaccgacgtggcgttctctgattggataaggtaactgtgtatccagtagagaatccagtagggtgtatccagtaagaggtatccagtagcaggcttagaggtagcacgcggttgcgaactaaggacctgaatcgaatcactttgcattttgccaactactgctcaagtgttcttccttttaaaatgttttgtatttggggaagggccatcggaactgaaatcatacttgtagacttctgaataccaggcatcgattgttttctttatgattttacatgggtcgttttggtatcctttaaggaatcctaaattctcaccgtacagaggggtttccagaatgtttgaagtcttttgtcctaatcaaaggtggctgcatagttctgtggaaatgcagcgatgtgtttgttataattaagagtcttcgtattgtgtcgcgttcgatgcagattgatataatgagtggcatttactaattgcacatgattaagctcgcacgtttgtggcattatcgatctatatttatacgatcattatatcttacaaaagacgcctcactaatcaaaacaacatgaatacgcactgatctaaaattttcaccaaatgcaatgaaagattatatgcatgtacaatgccagccaaatgtttattgcaatccgcaagagcttgtattatctcacgatcaattgcgtccatatcgcgtatcaatatccgatgatactggctgcttggggggatacgccnnnnnnnnnnnnnnnnnnnnnnnnnnnnnnnnnnnnnnnnnnnnnnnnnnnnnnnnnnnnnnnnnnnnnnnnnnnnnnnnnnnnnnnnnnnnnnnnnnnnctcagtgtcttccttttaaatgttttgtatttggggaagggccatcggaactgaaatcatacttgtagacttctgaataccaggcatcgattgttttctttatgattttacatgggtcgttttggtatcctttaaggaatcctaaattctcaccgtacagaggggtttccagaatgtttgaagtcttttgtcctaatcaaaggtggctgcatagttctgtggaaatgcagcgatgtgtttgttataattaagagtcttcgtattgtgtcgcgttcgatgcagattgatataatgagtggcatttactaattgcacatgattaagctcgcacgtttgtggcattatcgatctatatttatacgatcattatatcttacaaaagacgcctcactaatcaaaacaacatgaatacgcactgatctaaaattttcaccaaatgcaatgaaagattatatgcatgtacaatgccagccaaatgtttattgcaatccgcaagagcttgtattatctcacgatcaattgcttccatatcgcgtatcaatatccgatgatactggctgcttgggggatacgcctgaactttatcaagataacgacgatgcgtatagaataaccatgttaggcgagtaaaggttttgtatctaccttgttattgttgtcaagactgatgtgacgacgcctcgccaagcgaccgtgtgacgcgaacgcgtcatcagtgaagtcggcgtgaccttcactgtgttgtaccgcaatccttcaggtgattacgggacggtgattacgccaagattgtgggtacaagatgggcaccgacgtggcgttctctgattggataaggtaactgtgtatccagtagagaatccagtagggtgtatccagtaagaggtatccagtagcaggcttagaggtagcacgcggttgcgaactaaggacctgaatcgaatcactttgcattttgccaactactgctcaagtgttcttccttttaaaatgttttgtatttggggaagggccatcggaactgaaatcatacttgtagacttctgaataccaggcatcgattgttttctttatgattttacatgggtcgttttggtatcctttaaggaatcctaaattctcaccgtacagaggggtttccagaatgtttgaagtcttttgtcctaatcaaaggtggctgcatagttctgtggaaatgcagcgatgtgtttgttataattaagagtcttcgtattgtgtcgcgttcgatgcagattgatataatgagtggcatttactaattgcacatgattaagctcgcacgtttgtggcattatcgatctatatttatacgatcattatatcttacaaaagacgcctcactaatcaaaacaacatgaatacgcactgatctaaaattttcaccaaatgcaatgaaagattatatgcatgtacaatgccagccaaatgtttattgcaatccgcaagagcttgtattatctcacgatcaattgcgtccatatcgcgtatcaatatccgatgatactggctgcttgggggatacgcctgaactttatcaagataacgacgatgcgtatagaataaccatgttaggcgagtaaaggttttgtatctaccttgttattgttgtcaagactgatgtgacgacgcctcgccaagcgaccgtgtgacgcgaacgcgtcatcagtgaagtcggcgtgaccttcactgtgttgtaccgcaatcattcaggtgattacgggacggtgattacgccaagattgtgggtacaagatgggcaccgacgtggcgttctctgattggataaggtaactgtgtatccagtagagaatccagtagggtgtatccagtaagaggtatccagtagcaggcttagaggtagcacgcggttgcgaactaaggacctgaatcgaatcactttgcattttgccaactactgctcaagtgttcttccttttaaaatgttttgtatttggggaagggccatcggaactgaaatcatacttgtagacttctgaataccaggcatcgattgttttctttatgattttacatgggtcgttttggtatcctttaaagaatcctaaattctcaccgtacagaggggtttccagaatgtttgaagtcttttgtcctaatcaaagatggctgcatagttctgtggaaatgcagcgatgtgtttgttataattaagagtcttcgtattgtgtcgcgttcgatgcagattgatataatgagtggcatttactaattgcacatgattaagctcgcacgtttgtggcattatcgatctatatttatacgatcattatatcttacaaaagacgcctcactaatcaaaacaacatgaatacgcactgatctaaaattttcaccaaatgcaatgaaagattatatgcatgtacaatgccagccaaatgtttattgcaatccgcaagagcttgtattatctcacgatcaattgcgtccatatcgcgtatcaatatccgatgatactggctgcttgggggatacgcctgaactttatcaagataacgacgatgcgtatagaataaccatgttaggcgagtaaaggttttgtatctaccttgttattgttgtcaagactgatgtgacgacgcctcgccaagcgaccgtgtgacgcgaacgcgtcatcagtgaagtcggcgtgaccttcactgtgttgtaccgctatcattcaggtgattacgggacggtgattacgccaagattgtgggtacaagatgggcaccgacgtggcgttctctgattggataaggtaactgtgtatccagtagagaatccagtagggtgtatccagtaagaggtatccagtagcaggcttagaggtagcacgcggttgcgaactaaggacctgaatcgaatcactttgcattttgccaactactgctcaagtgttcttccttttaaaatgttttgtatttggggaagggccatcggaactgaaatcatacttgtagacttctgaataccaggcatcgattgttttctttatgattttacatgggtcgttttggtatcctttaaggaatcctaaattctcaccgtacagaggggtttccagaatgtttgaagtcttttgtcctaatcaaaggtggctgcatagttctgtggaaatgcagcgatgtgtttgttataactaagagtcttcgtattgtgtcgcgttcgatgcagattgatataatgagtggcatttactaattgcacatgattaagctcgcacgtttgtggcattatcgatctatatttatacgatcattatatcttacaaaagacgcctcactaatcaaaacaacatgaatacgcactgatctaaaattttcaccaaatgcaatgaaagattatatgcatgtacaatgccagccaaatgtttattgcaatccgcaagagcttgtattatctcacgatcaattgcgtccatatcgcgtatcaatatccgatgatactggctgcttgggggatacgcctgaactttatcaagataacgacgatgcgtatagaataaccatgttaggcgagtaaaggttttgtatctaccttgttattgttgtcaagactgatgtgacgacgcctcgccaagcgaccgtgtgacgcgaacgcgtcatcagtgaagtcggcgtgaccttcactgtgttgtaccgcaatcattcaggtgattacgggacggtgattacgccaagattgtgggtacaagatgggcaccgacgtggcgttctctgattggataaggtaactgtgtatccagtagagaatccagtagggtgtatccagtaagaggtatccagtagcaggcttagaggtagcacgcggttgcgaactaaggacctgaatcgaatcactttgcattttgccaactactgctcaagtgttcttccttttaaaatgttttgtatttggggaagggccatcggaactgaaatcatacttgtagacttctgaataccaggcatcgattgttttctttatgattttacatgggtcgttttggtatcctttaaagaatcctaaattctcaccgtacagaggggtttccagaatgtttgaagtcttttgtcctaatcaaaggtggctgcatagttctgtggaaatgcagcgatgtgtttgttataattaagagtcttcgtattgtgtcgcgttcgatgcagattgatataatgagtggcatttactaattgcacatgattaagctcgcacgtttgtggcattatcgatctatatttatacgatcattatatcttacaaaagacgcctcactaatcaaaacaacatgaatacgcactgatctaaaattttcaccaaatgcaatgaaagattatatgcatgtacaatgccagccaaatgtttattgcaatccgcaagagcttgtattatctcacgatcaattgcttccatatcgcgtatcaatatccgatgatactggctgcttgggggatacgcctgaactttatcaagataacgacgatgcgtatagaataaccatgttaggcgagtaaaggttttgtatctaccttgttattgttgtcaagactgatgtgacgacgcctcgccaagcgaccgtgtgacgcgaacgcgtcatcagtgaagtcggcgtgaccttcactgtgttgtaccgcaatccttcaggtgattacgggacggtgattacgccaagattgtgggtacaagatgggcaccgacgtggcgttctctgattggataaggtaactgtgtatccagtagagaatccagtagggtgtatccagtaagaggtatccagtagcaggcttagaggtagcacgcggttgcgaactaaggacctgaatcgaatcactttgcattttgccaactactgctcaagtgttcttccttttaaaatgttttgtatttggggaagggccatcggaactgaaatcatacttgtagacttctgaataccaggcatcgattgttttctttatgattttacatgggtcgttttggtatcctttaaggaatcctaaattctcaccgtacagaggggtttccagaatgtttgaagtcttttgtcctaatcaaaggtggctgcatagttctgtggaaatgcagcgatgtgtttgttataattaagagtcttcgtattgtgtcgcgttcgatgcagattgatataatgagtggcatttactaattgcacatgattaagctcgcacgtttgtggcattatcgatctatatttatacgatcattatatcttacaaaagacgcctcactaatcaaaacaacatgaatacgcactgatctaaaattttgaccaaatgcaatgaaagattatatgcatgtacaatgccagccaaatgtttattgcaatccgcaagagcttgtattatctcacgatcaattgcgtccatatcgcgtatcaatatccgatgatactggctgcttgggggatacgcctgaactttatcaagataacgacgatgcgtatagaataaccatgttaggcgagtaaaggttttgtatctaccttgttattgttgtcaagactgatgtgacgacgcctcgccaagcgaccgtgtgacgcgaacgcgtcatcagtgaagtcggcgtgaccttcactgtgttgtaccgcaatcattcaggtgattacgggacggtgattacgccaagattgtgggtacaagatgggcaccgacgtggcgttctctgattggataaggtaactgtgtatccagtagagaatccagtagggtgtatccagtaagaggtatccagtagcaggcttagaggtagcacgcggttgcgaactaaggacctgaatcgaatcactttgcattttgccaactactgctcaagtgttcttccttttaaaatgttttgtatttggggaagggccatcggaactgaaatcatacttgtagacttctgaataccaggcatcgattgttttctttatgattttacatgggtcgtttttgtatcctttaaagaatcctaaattctcaccgtacagaggggtttccagaatgtttgaagtcttttgtcctaatcaaaggtggctgcatagttctgtggaaatgcagcgatgtgtttgttataattaagagtcttcgtattgtgtcgcgttcgatgcagattgatataatgagtggcatttactaattgcacatgattaagctcgcacgtttgtggcattatcgatctatatttatacgatcattatatcttacgaaagacgcctcactaatcaaaacaacatggatacgcattgatctaaaattttcaccaaatgcaatgaaagattatatgcatgtacaatgccagccaaatgtttattgcaatccgcaagagcttgtattatctcacgatcaattgcttccatatcgcgtatcaatatccgatgatactggctgcttgggggatacgcctgaactttatcaagataacgacgatgcgtatagaataaccatgttaggcgagtaaaggttttgtatctaccttgttattgttgtcaagactgatgtgacgacgcctcgccaagcgaccgtgtgacgcgaacgcgtcatcagtgaagtcggcgtgaccttcactgtgttgtaccgcaatcattcaggtgattacgggacggtgattacgccaagattgtgggtacaagatgggcaccgacgtggcgttctctgattggataaggtaactgtgtatccagtagagaatccagtagggtgtatccagtaagaggtatccagtagcaggcttagaggtagcacgcggttgcgaactaaggacctgaatcgaatcactttgcattttgccaactactgctncagtgttcttcccttttaaatgttttgtatttggggaagggccatcggaactgaaatcatacttgtagacttctgaataccaggcatcgattgttttctttatgatttacatgggtcgtttttgtatcctttaaagaatcctaaattctcaccgtacagaggggtttccagaatgtttgaagtcttttgtcctaatcaaaggtggctgcatagttctgtggaaatgcagcgatgtgtttgttataattaagagtcttcgtattgtgtcgcgttcgatgcagattgatataatgagtggcatttactaattgcacatgattaagctcgcacgtttgtggcattatcgatctatatttatacgatcattatatcttacgaaagacgcctcactaatcaaaacaacatgaatacgcactgatctaaaattttcaccaaatgcaatgaaagattatatgcatgtacaatgccagccaaatgtttattgcaatccgcaagagcttgtattatctcacgatcaattgcgtccatatcgcgtatcaatatccgatgatactggctgcttgggggatacgcctgaactttatcaagataacgacgatgcgtatagaataaccatgttaggcgagtaaaggttttgtatctaccttgttattgttgtcaagactgatgtgacgacgcctcgccaagcgaccgtgtgacgcgaacgcgtcatcagtgaagtcggcgtgaccttcactgtgttgtaccgctatcattcaggtgattacgggacggtgattacgccaagattgtgggtacaagatgggcaccgacgtggcgttctctgattggataaggtaactgtgtatccagtagagaatccagtagggtgtatccagtaagaggtatccagtagcaggcttagaggtagcacgcggttgcgaactaaggacctgaatcgaatcactttgcattttgccaactactgctcaagtgttcttccttttaaaatgttttgtatttggggaagggccatcggaactgaaatcatacttgtagacttctgaataccaggcatcgattgttttctttatgattttacatgggtcgttttggtatcctttaaggaatcctaaattctcaccgtacagaggggtttccagaatgtttgaagtcttttgtcctaatcaaaggtggctgcatagttctgtggaaatgcagcgatgtgtttgttataattaagagtcttcgtattgtgtcgcgttcgatgcagattgatataatgagtggcatttactaattgcacatgattaagctcgcacgtttgtggcattatcgatctatatttatacgatcattatatcttacaaaagacgcctcactaatcaaaacaacatgaatacgcactgatctaaaattttgaccaaatgcaatgaaagattatatgcacgtacaatgccagccaaatgtttattgcaatccgcaagagcttgtattatctcacgatcaattgcgtccatatcgcgtatcaatatccgatgatactggctgcttgggggatacgcctgaactttatcaagataacgacgatgcgtatagaataaccatgttaggcgagtaaaggttttgtatctaccttgttattgttgtcaagactgatgtgacgacgcctcgccaagcgaccgtgtgacgcgaacgcgtcatcagtgaagtcggcgtgaccttcactgtgttgtaccgcaatcattcaggtgattacgggacggtgattacgccaagannnnnnnnnnnnnnnnnnnnnnnnnnnnnnnnnnnnnnnnnnnnnnnnnnnnnnnnnnnnnnnnnnnnnnnnnnnnnnnnnnnnnnnnnnnnnnnnnnnnnnnnnnnnnnnnnnnnnnnnnnnnnnnnnnnnnnnnnnnnnnnnnnnnnnnnnnnnnnnnnnnnnnnnnnnnnnnnnnnnnnnnnnnnnnnnnnnnnnnnnnnnnnnnnnnnnnnnnnnnnnnnnnnnnnnnnnnnnnnnnnnnnnnnnnnnnnnnnnnnnnnnnnnnnnnnnnnnnnnnnnnnnnnnnnnnnnnnnnnnnnnnnnnnnnnnnnnnnnnnnnnnnnnnnnnnnnnnnnnnnnnnnnnnnnnnnnnnnnnnnnnnnnnnnnnnnnnnnnnnnnnnnnnnnnnnnnnnnnnnnnnnnnnnnnnnnnnnnnnnnnnnnnnnnnnnnnnnnnnnnnnnnnnnnnnnnnnnnnnnnnnnnnnnnnnnnnnnnnnnnnnnnnnnnnnnnnnnnnnnnnnnnnnnnnnnnnnnnnnnnnnnnnnnnnnnnnnnnnnnnnnnnnnnnnnnnnnnnnnnnnnnnnnnnnnnnnnnnnnnnnnnnnnnnnnnnnnnnnnnnnnnnnnnnnnnnnnnnnnnnnnnnnnnnnnnnnnnnnnnnnnnnnnnnnnnnnnnnnnnnnnnnnnnnnnnnnnnnnnnnnnnnnnnnnnnnnnnnnnnnnnnnnnnnnnnnnnnnnnnnnnnnnnnnnnnnnnnnnnnnnnnnnnnnnnnnnnnnnnnnnnnnnnnnnnnnnnnnnnnnnnnnnnnnnnnnnnnnnnnnnnnnnnnnnnnnnnnnnnnnnnnnnnnnnnnnnnnnnnnnnnnnnnnnnnnnnnnnnnnnnnnnnnnnnnnnnnnnnnnnnnnnnnnnnnnnnnnnnnnnnnnnnnnnnnnnnnnnnnnnnnnnnnnnnnnnnnnnnnnnnnnnnnnnnnnnnnnnnnnnnnnnnnnnnnnnnnnnnnnnnnnnnnnnnnnnnnnnnnnnnnnnnnnnnnnnnnnnnnnnnnnnnnnnnnnnnnnnnnnnnnnnnnnnnnnnnnnnnnnnnnnnnnnnnnnnnnnnnnnnnnnnnnnnnnnnnnnnnnnnnnnnnnnnnnnnnnnnnnnnnnnnnnnnnnnnnnnnnnnnnnnnnnnnnnnnnnnnnnnnnnnnnnnnnnnnnnnnnnnnnnnnnnnnnnnnnnnnnnnnnnnnnnnnnnnnnnnnnnnnnnnnnnnnnnnnnnnnnnnnnnnnnnnnnnnnnnnnnnnnnnnnnnnnnnnnnnnnnnnnnnnnnnnnnnnnnnnnnnnnnnnnnnnnnnnnnnnnnnnnnnnnnnnnnnnnnnnnnnnnnnnnnnnnnnnnnnnnnnnnnnnnnnnnnnnnnnnnnnnnnnnnnnnnnnnnnnnnnnnnnnnnnnnnnnnnnnnnnnnnnnnnnnnnnnnnnnnnnnnnnnnnnnnnnnnnnnnnnnnnnnnnnnnnnnnnnnnnnnnnnnnnnnnnnnnnnnnnnnnnnnnnnnnnnnnnnnnnnnnnnnnnnnnnnnnnnnnnnnnnnnnnnnnnnnnnnnnnnnnnnnnnnnnnnnnnnnnnnnnnnnnnnnnnnnnnnnnnnnnnnnnnnnnnnnnnnnnnnnnnnnnnnnnnnnnnnnnnnnnnnnnnnnnnnnnnnnnnnnnnnnnnnnnnnnnnnnnnnnnnnnnnnnnnnnnnnnnnnnnnnnnnnnnnnnnnnnnnnnnnnnnnnnnnnnnnnnnnnnnnnnnnnnnnnnnnnnnnnnnnnnnnnnnnnnnnnnnnnnnnnnnnnnnnnnnnnnnnnnnnnnnnnnnnnnnnnnnnnnnnnnnnnnnnnnnnnnnnnnnnnnnnnnnnnnnnnnnnnnnnnnnnnnnnnnnnnnnnnnnnnnnnnnnnnnnnnnnnnnnnnnnnnnnnnnnnnnnnnnnnnnnnnnnnnnnnnnnnnnnnnnnnnnnnnnnnnnnnnnnnnnnnnnnnnnnnnnnnnnnnnnnnnnnnnnnnnnnnnnnnnnnnnnnnnnnnnnnnnnnnnnnnnnnnnnnnnnnnnnnnnnnnnnnnnnnnnnnnnnnnnnnnnnnnnnnnnnnnnnnnnnnnnnnnnnnnnnnnnnnnnnnnnnnnnnnnnnnnnnnnnnnnnnnnnnnnnnnnnnnnnnnnnnnnnnnnnnnnnnnnnnnnnnnnnnnnnnnnnnnnnnnnnnnnnnnnnnnnnnnnnnnnnnnnnnnnnnnnnnnnnnnnnnnnnnnnnnnnnnnnnnnnnnnnnnnnnnnnnnnnnnnnnnnnnnnnnnnnnnnnnnnnnnnnnnnnnnnnnnnnnnnnnnnnnnnnnnnnnnnnnnnnnnnnnnnnnnnnnnnnnnnnnnnnnnnnnnnnnnnnnnnnnnnnnnnnnnnnnnnnnnnnnnnnnnnnnnnnnnnnnnnnnnnnnnnnnnnnnnnnnnnnnnnnnnnnnnnnnnnnnnnnnnnnnnnnnnnnnnnnnnnnnatattagtgatatagtacattacttctaagcataaaatagcaatccgcgcggctttgagatataaagcaaatcagtttacggttaccaactcaacaatcatgcagacttcggagcttactcaatggagcgatcttggctacaatgatcaagaaatgatctgccggtttaaatctctttcagtggagtttcttcgtgaaaacatccgccctggtgatctcgtatgggaaaccattttggcataccagaacctctcgattgaatttatcactgatcacatcgaagtgcttccacactgctttgacaagtgggggcaaaatggatgaacgatcatatccttcggtctgtcacaccttccttccatatagcttcatcaatcaacacagcgataaactgtggatggggtcggaaaaaattcagactgaagtgaacaaccacaagcgcattgaagtggaagccattttcgagacggtgatgcctgaaaaagccatagcaacaaagattgcttcatactatgtctgactgcttctgttcattgataacaaggtagatactgttgtcaagactgatgtgacgacgcctcgccaagcgaccgtgtgacgcgaacgcgtcatcagtgaggtcggcgtgaccttcactgtgttgtaccgcaatcattcaggtgattacgggacgatgattacgtcacggtgattacgccaagattgtgggtacaagatgggcatcgacgtggcgttctctgattggataaggtaactgtgtatccagtagagaatccagtagggtgtatccagtaagaggtatccagtagcaggcttagaggtagcacgcggttgcgaactaaggacctgaatcgaatcactttgcattttgccaactactgctcaagtgctcttccttttggttatgagcccaagccccgtcttccctgaccaagaccccgactacgccttcgccatggacgccgccccgaccgcgaccgcccgcatcaacaagttcgacggaaccaacttccacacatggaagttcaagatgcagatggtgctggaggagcgcgaactgtgggaagtgacgagtggggaagtgaagctcgagcagtgcacgaccgcggcggaccaagcgacgtttcgcaagaagtcgcgcaaggcgctggcgatcgtctgtctcgcgttggaggactcgcagctgccgctggtgcggtcggcgaaggatgcgcatgatgcatggtcaagactcgagggacacttcgagaagaagagcctggcgaacaagctctttcttcgtcgacggttcttcacgacaacgatggacgaaggtgatgatgtgctggagcacattaacaagctcaagacgctggcggaacagctcgacgcggtcggcgctccggtcagcgaggacgacttggtgatcacgcttcttgccagtctgagcgagtcgtaccagttcctcatcacggcgttggaatcgcgttccgacacgctgacgtgggagctcgtgacgtctcggctcctgcacgaggacatgaagcgcaaggaacaaggtggtggtgctgacggaaccgcgcacgctcaaggtcaagcgttcatgacaagcgacaacgggaagcgcaagggacggcaggcgcaagcgcagaggacgagcgcctgtcactactgcggcgagcacggacattggatcgccaagtgtccggtgcggatccgcgagaacggggagcggcagaggccgcaacgagcgaacgtcgcgcaggtcgaagatgactctggcgacttcctcttctcggttggtggcgacacgggtgcctccaagctgagcggcatgtggctggtcgactcgggtgcgacgcagcacatgacgtactcgaaggagtacatgaagaactacaagaagatctctccggtggacgtgcatctggcggacgacggcgtggttcaggcggtggggagcggcgacatcgtgatgtcgatgcagacaccgcgcggcatgaagaagggtgtgctcacgggtgtgtggcacatcccgaagctgtcgcgcaacctgttctccgtcggccgcttcaccaaggacgtcgggccagtgaccttcgagagcgacgggtgcttcgcggaaacgaagggtctcaagtggaagctcggcgctcgcgaaggcaaaggactgttcaagctctgcatgacgccgaggacgcctgctgacgaggccaatgcggcaagctcgaagaatcgccaaggggacaccacgtcgtacctctggcaccttcgacttggtcacatcggccatggtggtctcgacgccatcgtcaagaagggctacggcactggcatcccaatgacgtcggtgaagcagtgggaggtgtgcgacgggtgcgcactcggcaagcaaacgcgagtaagcttcatgaagtcgtcgccgaaccgtgcgaagcaagtgctggaggtggtccacagcgatgtgtgcggtccgatgcagacggcgacgttcggaggcaagcgctacttcgtcacgttcatcgacgacaagtcgcacttctgcgtggtgtacctgctacggaacaagtcggaggtggctgccaagttcgctgcgttcgtcgcgttggctgagacgcagaccggcaagcgagtgaaggtgcttcggagcgacaacggcggcgagtacacttcgggtgcgatggccaagttgtgtgcggatcgcggcatcgagcagaagttcacgccaccatacacgcctcagctcaacggagtggccgagcgaatgaatcggacgctggtggagtgtgcgcgctgcatgctggagcacgccgggttgtcgaaggagtactggggagaagcggtgatgacggccacgttcctccgcaaccggtgtccgacgcgcgccatcagtcacgacaagtcgccgcaccacgtttggaccggcaagaagcctttgctggccaacctcaaggtgttcgggtgccacgcgtacgtgcacgtgccgaaggagaagcggtcgaagttcgacgctcggtcggtgcgctgtcgtttcctcgggtactcggagcacgagaaggcgtatcggttcgaggagatcgagagcggtcgcgtgttggtgagccgcgacgcgcagttcatggaggatgtcttcgacggtgggagacgcgactacgcttcgaaggaggtgttggtgggtcttccgacagatgatgatgaagacaccacggatgaagagactcagtccggatcagacgagaacagagaagaagctgcgcggaatcaagactttgaacccggcagcaagcgacacccgcgcacgcagtcgctcgaggaagccgtggaggttccgagtgccaagcggtatgcggtgccgagacgacagcagccgctggacgagatgtctgccgcagcacaagagaaggaagacttcgaggctgcgtacgtcgtggattcagtgggagagatgccgacaacgttcaagtcggcgatggaatccagcgacgcagacaagtggaaagaggcgtgcgactcagaggtggagtcgctccgcaagaacgagacgtggaccctgatgccactgccgaagggacgcaaggcgatcagctgcagatgggtgttccgcgtgaaggagaaccagtctggagagatcgagcggttcaaggcgcgactggtggcgaaggggttctcgcagaagtacggcatcgactacgacgagacgttcgcgccggtggccaagttcacgtcgattcgggtgttgctgagtctggcggccaagtacaagctcacagtgcaccagatggatgtgaagaccgcgttcctcaacggcttgttggacgaggacatctacatggcgcagccggacggatatgtggacggagatcgacccgactacgtgtgccggctcaagcgttcgctgtacggcctgaagcagtcgccgcggatgtggaacaagacgatcgacgagttcatgttgaagctggggttcaagaagtgcgagtccgaccactgcatctacttgaagcgggacaatcacgacatgatgttcgtggcactgtacgtggacgatctggtcctcgccagcagcagcgacgggatgctgaaggacacgaagcaggcgctgagtgaccggttcgagatgaccgacatgggccagctcaagtactttctcggtatggagatcgagcaagatgtggcgactgggaaggtgtcggtgcggcagaccaagttcgcgaaggacattctcgagaagttcaagatggatgagagcaaccctgtgaagacaccgcaggatccgggtctgaagctgaccaaggccatgtgcgagggaggctgcaagcacgacgagaccatggcgaatgttccgtaccggaacgccgtgggctgcctcatgtatctcatggtggggactcgtccggacctcgcagcggcagtgggagtgctgagccagttcgcagcggacccatgtccgacacactggcaggcgctcaagagggtcttccgctacatccgaggcacgaagacgcacggcctcgtgtttcaagcgagcagcgaggacggactgcaaggctactcggacgcggactgggccggcgacatcgagtctcgacggagtacgagcggctacgcgttcatgatgaacggcggatgcatcagctggcgaagcaagaagcagcgcacggtggcgctctcgtcgacggaagccgagtacatggcgctgtcggaggccacgcaggaggcggtgtggctcaaggtgtttctgtgcgagctgggcgagatggcgagcgatgaagcggtgaagatctacgaggacaaccaaggctccatcgcgttggccaagaacccggagttccacaagcgcaccaagcacatcgacattcgctaccacttcgtgcgcgagaaggtggaagacggtcaagtggtgttgcagtatgtttcgacactcgacatgctggcggacatcatgacgaagccgatcgcggcgccgcagttcgacgcgctcaggacgaagctgggcatcgtggtcgctgacgagtcgagtgggagtgttgtcaagactgatgtgacgacgcctcgccaagcgaccgtgtgacgcgaacgcgtcatcagtgaggtcggcgtgaccttcactgtgttgtaccgcaatcattcaggtgattacgggacgatgattacgtcacggtgattacgccaagattgtggtacaagatgggcatcgacgtggcgttctctgattggataaggtaactgtgtatccagtagagaatccagtagggtgtatccagcaagaggtatccagtagcaggcttagaggtagcacgcggttgcgaactaaggacctgaatcgaatcactttgcattttgccaactactgctcaagtgttcttccttttggttatgagccaaagccccgtcttccctgaccaagaccccgactacgcattcgccatggacgccgccccgaccgcgaccgcccgcatcaacaagttcgacggaaccaatttccacacatggaagttcaagatgcagatggtgctggaggagcgcgaactgtgggaagtgacgagtggggaagtgaagctcgagcagtgcacgaccgcggcggaccaagcgacgtttcgcaagaagtcgcgcaaggcgctggcgatcgtctgtctcgcgttggaggactcgcagctgccgctggtgcggtcggcgaaggacgcgcatgatgcatggtcaagactcgagggacacttcgagaagaagagcctggcgaacaagctctttcttcgtcgacggttcttcacgacaacgatggacgaaggtgatgatgtgctggagcacattaacaagctcaagacgctggcggaacagctcgacgcggtcggcgctccggtcagcgaggacgacttggtgatcacgcttcttgccagtctgagcgagtcgtaccagttcctcatcacggcgttggaatcgcgttccgacacgctgacgtgggagctcgtgacgtctcggctcctgcacgaggacatgaagcgcaaggaacaaggtggcggtgctgacggaaccgcgcacgctcaaggtcaagcgttcatgacaagcgacaacgggaagcgcaagggacggcaggcgcaagcgcagaggacgagcgcctgtcactactgcggcgagcacggacattggatcgccaagtgtccggtgcggatccgcgagaacggggagcggcagaggccgcaacgagcgaacgtcgcgcaggtcgaagatgactctggcgacttcctcttctcggttggtggcgacacgggtgcctccaagctgagcggcatgtggctggtcgactcgggtgcgacgcagcacatgacgtactcgaaggagtacatgaagaactacaagaagatctctccggtggacgtgcatctggcggacgacggcgtggatcaggtggtggggagcggcgacatcgtgatgtcgatgcagacaccgcgcggcatgaagaagggtgtgctcacgggtgtgtggcacatcccgaagctgtcgcgcaacctgttctccgtcggccgcttcaccaaggacgtcgggccagtgaccttcgagagcgacgggtgcttcgcggaaacgaagggtctcaagtggaagctcggcgctcgcgaaggcaaaggactgttcaagctctgcatgacgccgaggacgcctgctgacgaggccaatgcggcaagctcgaagaatcgccaaggggacaccacgtcgtacctctggcaccttcgacttggtcacatcggccatggtggtctcgacgccatcgtcaagaagggctacggcactggcatcccaatgacgtcggtgaagcagtgggaggtgtgcgacgggtgcgcactcggcaagcaaacgcgagtaagcttcatgaagtcgtcgccgaaccgtgcgaagcaagtgctggaggtggtccacagcgatgtgtgcggtccgatgcagacggcgacgttcggaggcaagcgctacttcgtcacgttcatcgacgacaagtcgcacttctgcgtggtgtacctgctacggaacaagtcggaggtggctgccaagttcgctgcgttcgtcgcgttggctgaaacgcagaccggcaagcgagtgaaggtgcttcggagcgacaacggcggcgagtacacttcgggtgcgatggccaagttgtgtgcggatcgcagcatcgagcagaagttcacgccaccatacacgcctcagctcaatggagtggccgagcgaatgaatcggacgctggtggagtgtgcgcgctgcatgctggagcacgccgggttgtcgaaggagtactggggagaagcggtgatgacggccacgttcctccgcaaccggtgtccgacgcgcgccatcagtcacgacaagtcgccgcaccacgtttggaccgacaagaagcctttgctggccaacctcaaggtgttcgggtgccacgcgtacgtgcacgtgccgaaggagaagcggtcgaagttcgacgctcggtcggtgcgctgtcgtttcctcgggtactcggagcacgagaaggcgtatcggttcgaggagatcgagagcggtcgcgtgttggtgagccgcgacgcgcagttcatggaggatgtcttcgacggtgggagacgcgactacgcttcgaaggaggtgttggtgggtcttccgacagatgatgatgaagacaccacggatgaagagactcagtccggatcagacgagaacagcaaagaagctgcgcggaatcaagactttgaacccggcagcaagcgacacccgcgcacgcagtcgctcgaggaagccgtggaggttccgagtgccaagcggtatgcggtgccgagacgacagcagccgctggacgagatgtctgccgcagcacaagagaaggaagacttcgaggctgcgtacgtcgtggattcagtgggagagatgccgacaacgttcaagtcggcgatggaatccagcgacgcagacaagtggaaagaggcgtgcgactcgaaggtggagtcgctccgcaagaacgagacgtggaccctggtgccactgccgaagggacgcaaggcgatcggctgcagatgggtgttccgcgtgaaggagaaccagtctggagagatcgagcggttcaaggcgcgactggcggcgaaggggttctcgcagaagtacggcatcgactacgacgagacgttcgcgccggtggccaagttcacgtcgattcgggtgttgctgagtctggcggccaagtacaagctcacagtgcaccagatggatgtgaagaccgcgttcctcaacggcttgttggacgaggacatctacatggcgcagccggacggatatgtggacggagatcgacccgactacgtgtgccggctcaagcgttcgctgtacggcctgaagcagtcgccgcggatgtggaacaagacgatcgacgagttcatgttgaagctggggttcaagaagtgcgagtccgaccactgcatttacttgaagcgggacaatcacgacatgatgttcgtggcactgtacgtggacgatctggtcctcgccagcagcagcgacgggatgctgaaggacacgaagcaggcgctgagtgaccggttcgagatgaccgacatgggccagctcaagtactttctcggtatggagatcgagcaagatgtggcgactgggaaggtgtcggtgcggcagaccaagttcgcgaaggacattctcgagaagttcaagatggatgagagcaaccctgtgaagacaccgcaggatccgggtctgaagctgaccaaggccatgtgcgagggaggctgcaagcacgacgagaccatggcgaatgttccgtaccggaacgccgtgggctgcctcatgtatctcatggtggggactcgtccggacctcgcagcggcagtgggagtgctgagccagttcgcagcggacccatgtccgacacactggcaggcgctcaagagggtcttccgctacatccgaggcacgaagacgcacggcctcgtgtttcaagcgagcagcgaggacggactgcaaggctactcggacgcggactgggccggcgacatcgagtctcgacggagtacgagcggctacgcgttcatgatgaacggcggatgcatcagctggcgaagcaagaagcagcgcacggtggcgctctcgtcgacggaagccgagtacatggcgctgtcggaggccacgcaggaggcggtgtggctcaaggtgtttctgtgcgagctgggcgagatggcgagcgatgaagcggtgaagatctacgaggacaaccaaggctccatcgcgttggccaagaacccggagttccacaagcgcaccaagcacatcgacattcgctaccacttcgtgcgcgagaaggtggaagacggtcaagtggtgttgcagtatgtttcgacactcgacatgctggcggacatcatgacgaagccgatcgcggcgccgcagttcgacgcgctcaggacgaagctgggcatcgtggtcgctgacgagtcgagtgggagtgttgtcaagactgatgtgacgacgcctcgccaagcgaccgtgtgacgcgaacgcgtcatcagtgaggtcggcgtgaccttcactgtgttgtaccgcaatcattcaggtgattacgggacgatgattacgtcacggtgattacgccaagattgtggtacaagatgggcatcgacgtggcgttctctgattggataaggtaactgtgtatccagtagagaatccagtagggtgtatccagcaagaggtatccagtagcaggcttagaggtagcacgcggttgcgaactaaggacctgaatcgaatcactttgcattttgccaactactgctcaagtgttcttccttttaaaatgttttgtatttggggaagggccatcggaactgaaatcatacttgtagacttctgaataccaggcatcgattgttttctttatgattttacatgggtcgttttggtatcctttaaggaatcctaaattctcaccgtacagaggggtttccagaatgtttgaagtcttttgtcctaatcaaaggtggctgcatagttctgtggaaatgcagcgatgtgtttgttataattaagagtcttcgtattgtgtcgcgttcgatgtagattgatataatgagtggcatttactaattgcacatgattaagctcgcacgtttgtggcattatcgatctatatttatacgatcattatatcttacaaaagacgcctcactaatcaaaacaacatggatacgcactgatctaaaattttcaccaaatgcaatgaaagattatatgcatgtacaatgccagccaaatgtttattgcaatccgcaagagcttgtattatctcacgatcaattgcgtccatatcgcgtatcaatatccgatgatactggctgcttgggggatacgcctgaactttatcaagataacgacgatgcgtatagaataaccatgttaggcgagtaaaggttttgtatctaccttgttatcaatgaacagaagcagtcagacatagtatgaagcaatctttgttgttatggctttttcaggcatcaccgtctcgaagatggcttccacttcaatgcgcttgtggttgttcacttcagtctgaattttttccgaccccatccacagtttatcgctgtgttgattgatgaagctatatggaaggaaggtgtgacagaccgaaggatatgatcgtccatccattttgcccccacttgtcaaagcagtgtggaagcacttcgatgtgatcagtgataaattcaatcgagaggttctggtatgccaaaatggtttcccatacgagatcaccagggcggatgttttcacgaagaaactccactgaaagagattcaaaccggcagatcatttcttgatcattgtagctaagatcgctccattgagtaagctccgaagtctgcatgattgttgagttggtaaccgtaaactgatttgctttatatctcaaagccgcgcggattgctattttatccttagaagtaatgtactatatcactaatataacaagcagttaacaatgagttttctagtattcgacactgaaaccactgggcttccggaaagcttcaatttgttagccaccatgttgctctgtcggcgatagcgtacgcagcatcgcagctactgccgcctccccaatgactgttgacagtcgttggagtgcctcccactctggatccgacaggtggaggcagtcagcgcgtgcaacatgagttccaggcgaagtggagctttccatgggcacctccgcgctcatgaaaaggttctcggctcctcgttcgtacagctccgtacgaacgttcaggcagtcggtcgttggacggactacaaagtgctaccaggtgtagcgggcctaccttggctcactactacggcttacacgtatgcgcacgtgtatgaggaagcgtaggtttcttttatttgagttaagtatactcgagatccatgaatatactttaaacaagataaagactccaagtagcgggttttggtaaaagatgagaactgctattgttgttttatgtttctgacttcctctaaaatacaatattctaaactaggaatctgccaacggctggttggcaggattctgctaacatgcaagtcagtcattggctaaaatatgctgctttcagccaataggaatcctaaatgtgtatggaccacccgtcgtggtggtcgtaaatgtatgtagccattggtgtacgttacaccaaggtcgaggaagtgttcaaacctctaacagacatcgcatctgttagagtaacaagtgactgtagctataaccccgttacagtttgggtatcatgtccatagcttcagcgtgagatcacgagctgctcctgactaacaccaccccttatcacccctgtaccagtagctacggcccatgttcagtgtcatatctgataacaaactgatgagtaagctgtgattaagataccggatcgagtggtattttaatgatattaaaatatctacactgactacggtaattagtctgagtcagactaattactactcagtctgagtcagactaatttatgtgagcacatttttggcgctctccattcacaaagactaataatgaacatagactaattctgaacttcataattagtctgagaagtatactaaacgtaggtatattgtgccttgcatgctttctgtctaaacaacgacgtaattcgttgttttagcaaatcacggtgattagcccatcattgagtcaggaggctaactcgtcgatttaagatagaatagctgctaagacaaggagttaacgttgacttatgctcactttcgttgaatggctggagtaaatccgacaatactacggccctgatattctaattctaacttgctcgctttgtctgattgctttctagtcgatgattgacatgcgttggcgatctatcgtactaaactattatacgtctacaatattgaagaacatccctgttttgagctgcaagcagctttaaagtcagcgtttcctgcacatccaaacatttctagtagaaattttctactgctactatatgccgtgctctgaaattcgagcttggtttaacgcaaggccacgacgaagagagcgaagaagaaaacgtccccgccgaaatcggtgcttagttttatgcaaggagttggcaccattctatcggggaccttatcagtttgttttcttgcggcttcgtcgcgttgcccccagcgttgcgggacttgtcctcggccgacgctaggtaaacgcggcgtagatcaccctccgagtccgatccgtctgatcccgtgtccgatccagacccctggctcgcgatctgtcaacgtcaagacgcctgtgggactcgaaccaggttggatccacatgtagtatcattccgggaagtcgggctctcactaaccacctctcgcgacttcttccactggtgcgacagtcttccaaaaccgtgcgaatttggtgcgaatcgtatttaaccgagaacaggtgagctcctcgtttgcaccgccagttacgctacgcttcgcttcgctcatggcgggcaaggcgtcggtaaaaagatagtaactacttcgcagtgcaactactccggcctacacgccgaccattgcagacctccgctacgctccggttgcaaacggtctctctaaggcctcatatgacatatgctagtttggagtttcgcaccagtcgaaagaagtcttacttcttggtcacatatgcatagacggaaacaggtcgctcgtctcgtactggtttccaagccagcgagccgccgagaagatgttaaactaggaaacatcttctcggcggccggcggcagcattcccgcgtgtttattcgggtcaaaccactggcgcaattggttgaagaactcctccatcgggcattctccggcttcgtgcacgtcaccgcaggccttgcacaccctcaagcatcgctccgtcgggtgctggtcaccacacttctgacacgtcaacaacttccagcagtctctctcagcgtggcgacgagaaccacagtggcgacaacgcggacgatcgcgtcccgagtcgttgggatcaaagttgtgacgcgccggctctcccggcggggcctgccccgcgacgaacaacttggcgcgttcttcgtcctcctcgtcttggtcgtactggcgatcgtcgctgtcgcgactttcgcgttccgagttgtactcgtccgacgcaacgtgaatcgcatgcacggcgcgcgccggctgagtcggcggggtcggcgccttttgggggaacttgttcgagcagaagagagtcttcttctggtgagccaatccacgttgtcgggcacgcagcttcttctccagcgcctcggagttggcgacctccagtagcgtgagacgcgaggcgagttcggcctcctgcgtgttcagcgtccggatgaaatgctcgacgtgttcgcgcttctcttcagtcgtaccctcggcgtatgggatgttggccctcaagcccgcgacgttgagccggtacaagtaattcagaggggtctcgtcggggcgctgagccgcatggtagtagcggctggccattgacacgcccttgccgcagtactgcacacggaattgctcccggtccatgatttcttgaccttcctgggcaactggagataccattggcgcgcagggccgctcattagatcgctgaactgccacagtctggctttctctccgctggcgtcccgtcccgagaactctttcagctcggaagatgctgagaggcgtacgcgaccgaggcctacgccgccggctgtcaccgtcgagacggcggctgcggttcttggcgctccgatgtccaagtcgaacaggtcgtcggggtcttcatccgcgtcgcgtcgagttctggacctcgtcgaagaacgcgagctgaccgactccatggcgacacccgctgcctcctgggggcgagccaccgtgggtgcaggattcacgggcggcttcggccccgccgggattgcggctgtttcggcgcgtggggtgctcatcactgtcgtctgcatcagcttgttgatagattctctcaaggccttaggaagcacctcctcggcgggtttcgtcacttctgtgcgtgcgggcgccgcggatagctccacgacgcgcggcggccggttcatgggcatgcgcttaggcggctcgaaactgctgtcggagcccacgcttgattggtatcgaggtggtggcgagggcgtggtcgtcgaagtctgggctgggtccgccgagggacccggcgcgtcttgtttgacggatccggcgagaatcgtcaagggctcctgcacgacgcgaatcgcccgtaaccaagatttgaggtcccaatcgcacatcctctccatctcgaaagcccccaacacgaaccccgagtcacgcagcatctggaagagagtcggcgcggcctgtcaagttgctcatcagcatgggcttgaggaagaccaagattgggtcttgctctagcagacggaagagctccgtgcgcgccacgacgtaccgtacctcatcgacggtgtactgacgtcccgtgtccttgccttgcggcttggacagcgactcctccgccgagtccggcgcgcgcagcttcttcatcttcttcttgggcgacttgggcttcgtggctgccttggcggtgggttgttgttggtcgtcggtctttgcaggctttcgaccggtaggaccgcgacttgcgtcacggcccttcgcggctccctcgtcgggagccgcatcgggaacagcaaactgttcttcgtagccctcctggtcgtcgctggccccgtggcctgtcgtgaaggttccctcagagctccacgacgcgaccggtctctcactgtgctctcttgcagtcggcgaccttccagccgactgcgcacctgccaccgatgcctcttggattgttagcccgtcattcgaagtagtactcccgggtcgcggcaccattgtggagtagcgccctcgcagaaatctcgcggagtcgatctcgcacaaactcggcgcgtctggatagcggtcgcgccgagccaattattcccggttgttggagtagcgtatcttcgaaatataggcccaagtcttcgcaggcttcagagttggggggggggtcttgtgttgacgccttcttcctccggcgcccggcgcgcccacttcttccgcggggtactacaccacaccatcaaaacttggtgcatgcctcgaccgggcatacgccgttctacgtgaatgccatcaggcacccacgcctcccgagtctactcgggatggtggctccatcctgaagtgggggaggatctacgactgcaacgcagcagccgcagaatgccgctgacacttgcacagtgtcagccgcgactacgcgcaagaagaacaagaaacacgcgtctgtgcagggcacagacaccgcgaagacgaacgcagaggccgggcctactgctggaaatgagctgaacgagttcagctcggacacaatcaacttcgtgcagcgcagacaagccgtcattcggtttgtccaagacgctattgcagcttctgttgatcgacagaagctgaacgcagacaacgttggcaggggcaacacaaatgaattcaagaagggttcattggttttgttcgctactcaaaacctgcctaaacatgccgtttccgacttcggggcgagcaagctcgctccgcgctttatcggaccgttcactgtgctggcacggcacggcaacgcctacacactggacataccgtctagtatgcgcatccatccgacgttctacgtcggacggctgaagctatacctgcagtacgagctacctagctcggctgaaccgaagcagaagactcggcggaagccgtcatcctttccagcgcgacttcgcgctggagcagcgggtcgggctaatggtccagctcggccggaacggtcgaggcggtctgggaggccgccgcaacctgaggatacttcagagcgccgaacccagcgctctggaattactccacgaccggaactcggtcgtggggagacgcgagatcagggtcaacaccaagttgaccacacacggggcgtgtttccaccaccaccgccgccaattcgtgacgcacacggcgcaactcgatggatagttgagcggattgttggtcacagtatcccgagaacgaacaggcaaccggttcgttttcgtatccgttggagaggattccctcccaaccaagatacatgggagccgtggaacgtcttgctcgaagacgtcccggacatggtgagggcgtacgaagcccaccatgcgctacacgctggaaagtaatacgagcgctgttgttaacaacagcgcccgaaggcacttcaagggcaggctgtcccgcacgttgccgcgcattatacgcagcagtagagatgtcctccgctgctgcaccaggggtcttcaacttcggcgtgctcgttacggaacgagcacgctctcttcaaacgtcacgcattgaccaaatggtcaatggtggttgacgtgccgagaccagcacgtctaaccttgacggggggggggggatggtgaggcgaggcgggtgaacgcctgaccgcccaggtgtttagcttggcgcgtcccgggtgtagactcccgagtggagtacacccagaacaaaccctagccggagatagtacacctagatgtacactccaactggggtggcgtgtgtccttgtgaacaatccctgtgggatcgtttgtcttcgtaaccaggggtcttcaaccgtggatgagttgtcttgatacttgtagatcgctaggtagcagggcagaacgtaagcttcctggacgtcgcctctgacagccttcaataaccaaacaatacaaacaaatacagagttatatacaaacacgtagcctttccttattgttttggaccgtgaaagggtcggtcactactccagtcaactccagccggactccgggatactggtcaatcccggtcggctttggctcacgcgcaccaccctcaagtactgagggaaacgaacacaatcaaatacctcctatcacacaatagctcttaaatcaatacttaccacccggggcttctccaaccggggttaaaaggtaatcggtaatatgaaatgcggggccttcctggtctggacgagctcaaccgcaactaggaaatgaaatgggatggtcaacatcgggttgtcgcccggtactcaccccaacttggactggacttggttgcgggagctcgacccagatgtcacagttgctgggccctcacacgtagacttagtcggccctccgggaatgcacgtccggtagactgctccaactcacttgtgtgatccttggcaaaacgaactctgtttatctgttatctgtggtctctctctctctgtctggctatcttctgtcgatctttacatgcacccatcttgacttgtcttcactatggtcttgtcgtcgtaatcgtccgcggtccctcgtagcatacctccagtaagtataatcatcactgggtacgcaaccgaagttcaatgtcccacggaatccgaacagatcttggctggtcggcttggtcggtcggaaacatcttggactttgtatactggatcttcacatctgggatggtatcttggtatcttggtatctccaaacgggatcatacaccacttgggcttcgcatccgggatgtcttggacagcttcacggcttctgggtcttcactcgatccggtcaggctcctcttgcgttgtacactgcaccaagagcaggtggcctccagtcggaggcacttctacgctcccttgggctttgcctctcgttcggtacttggttccagccgcggtccgctcttggggacatctccatccggggtcaccaaaccttgtacactaccaacgcgagtccggccgggatccgctttcccatacgccacgtgtcgctgcctccctctcccatagtgagcctctgagccaaccaatcacaggcgcggctcggggaatcctcgaaaatctccaatcccatcgtgtcaaacgcccctcttgttacgatccattgtagagtccattcggcgaaacgatcgatcatgacaagatctcacgatccaagcaagcccagatcggtgggcgccccagacggggatggcttcagtcaactcccaactgtcgcgtctcttctttgcgccctgtcccaaccggttcacttttcatcaatttctctttccagtctgcggcaacgaaatctccactcacaatgaaatctgcgtgccacactcaagccatggacgcccccgcatcgagcgccgacgcgccgcttatcccagcacaactcccgtcttctgcgcctccagtggggggtgcggaggcgggcgcgggcaacggcggcggcagtctggctgctagcggcgagacacatgtgccggccaagccggccccgtcgaccctgcgcgcaaggtcgacgaggccggggagaccatggaggtcgacgagtgggtggacaccggcgaggacgacgacgccgacgaggaggaagaggaagaggaggagagcgcagcgtcttctgcgaggaactcgtccctgtgcaccaacgaccagcccgtccgggaggacgaggccatggaagaagctcccatccgggatcctctacgcgagcgcacaccaagtgtcacggctgcggtgtccagcctgctgtcgttcgatgaggtgatcgacttcaaggcgtctggtgtcctctcgtcaacctatccgggatctcaagaggttgtcaacatcctgccttcacgccacattctcccgcccaagcggcttggtgacggcaactcctatctggtcggtgttcctgcacacccactggcgtatcagtcggagcgctacatccaggaggggtatggtgacacggaggcgttgacaatcttcgacggcttctccgcccaggccctctatgacctgggtaacctggttggcagtcagacggagctgcgcaataacttgctgcgcctgcatgccaaccgggagtctctcaggctgccgcaaatatatagccggaacgggtcattgtgtccactctcattttcttccgatataagaacactcagagacccattcctctaaccacaaccatagcttgcccattttctcttcaacactttaagactctccagaacacttcttatcctccttagattaaaagagcacttctctacttcccacaatatccaaacatcttctcgttaagtaaatcttagagcaaaaacgaagttctcatggattttctaaatttcagaataatctctgaaattcagaatttattggaaaattcagatttcaataagtcatcaacttctgcctacgtctgagtgtcgctcaatagtcattgctatcttaagggaaatttaataatatataggatacgatgtgcaattacctaactaaagacggaatcaaatgcaagctgtcgccgaagaaagacatttgtcatattcatcggaagtattcgattatcgatcacaaaaataatgagattcgaaacttgaacaagccaatcgcgaaggcgaggatgactaacaaatcgctacgcagtgaagttagccatctcaaggatgatatagtctttcttcgatcagctctctagattaaagatagtatcatatcctcaatgaagaaagcctatgaccaattcatgtcaatcaagcaatttgagatgaagaaagctcgtttatcgaaatatgtccacgatatgactgacatatacgagctaaaatcgttttgcagatcgaaagtaaacgtgttgacactgtcagagattttcggagaacatgacgactactggagacactacaacgagctgcgaatccaaagaaacaagctgtaccatgaattttagtccatcttaacaaaaacaaaatactagtatatccaacgagactaaaccatgaagagctacaatacagaagaagagagactcaacgcgagacgagaggcgaatcggaaatactatcagcaaactcgcgaaagtagactcgctaagcaacatcaatactatctagatcataaagatgagattaacgagaaggacaaaatcagatatcagcaaaaatactagcgattagcgattaatcgatgaatatttttttgctactattagtataactgagaattttccgattgatcttaagcgtatttccccaagtaatatatccacatagtaaaaggaaaatgccaatctcatcagcccttaagaaagctcaaaagcaccgtagcgacctataccggttcgcaaagagtaagaatctgacaatccattgggatatgaagacaaagaagatggaggaaattgtcaatgcgttcaagagcaagaaagctatgacaattgtcaaggctttcaagtcatcgaagcttaacaatgatccatcaactctcaaagtcatcaacactacaactggaaaggtcaacgtatcgctaagtcgctttaatcgcattcggaagcagattgtatcgccagctgataagaagttgctaattcatatcaagggttcggatggtagaatcgcgaagtcataccacctcaacgatcgcgttgtaaatatcaacaatcttttcattgacgaggagaatcaatatagctcgggagctgacattgaattgaatattctacctacaacgaccattgagactgaatggctaccaaattctaagcgatctcgatcagagcgcaagaatttctttcgatatctgccgaaggccgactacaatctagaggcattccaagtgtattcagatgacttcttgattgaagataaatacaacgacgacagcttcgtaccgggcgagagcaacgacgacgaggcagctaactatccgtgctttctgttcgcgctatacaaggcagaagcaaacccagatcttgtgaagcggatctcacagacaatgttcaactcgggagctactgttgatttcattcggaaaaccgccaaggctttcaacatttgcatctctgttaggcaattccgtgtcaatcagaagactggcagatgcaataacgacacaacgatctatggcgataaatgcaaactcgatgtttatcctcggttctgttggtgagcatctatttgctattgcgccaccaaaggtgccctcgataaccccgagctagttgccgagcatggacgaactgatttccgaatcaagggagggagggttgttttcaacgataaaaaaatctctttcctcgacagctatggggtcgttagctatctataccaccaccgcgagactctcctgtcgcctatcacgcagcctaaatatgcctaatcttctcaacaacaaataccaaggggtgcgctcactggatgagggagacttcagtaattgcaacttcagagtcatgggtcgcgtcccaggaaaagagcttaagctcggtcaggctgtatttagagccttcaactgcatgacgcgtgagttctatgatgtccgaaaatacaacgtgatctacttcgacttcgagaccctggttctcaacggtattcatgttccatactgcgtataatatagtatttcagagttcaacgaaaactcaccatcttctccgacattcagtgagacgaggaacatctatggctttggctgcgagaagcaattcctagaatcgcttccgtccaacagcaagaatctcctctgggcttacaacgctggcttcgacgctcgtttcctgctaaaacatatgagctacaagtctaaggatactaatatgcttgattgcggctcttagatcaagcgagctcacggcttctataaaggacatgagattattattaaggattcgatgtccgtccttgctggagtattaactagactccctaagatgttcaaggacgcgtcgtcgtctttatctcttgagaaggagtgctttcctcatgctttgatcaacgagagcaactttagatccctctggcctctcgagtatcttgattcatacgacaacaaggacaccctcatcgataatgcttctaagataggagctatcgttgatgatacgtttgcgagatgtatgctactcactactgcaatcgcgatgttgatgtacttagagtatgtttcgaagcttttcgtgccctggtgaaggaggagttcgatcttgacatctatcgatttctcagtgtatcatctctctctcgcatatcaacacaacgagggctgcttcgatgactactatgaaatgaattcggtgctactaggcttcttacgccaaggaaccgttggtgggcgagtgatggcccgcgataacggcaaatatcacctgaagcacaagctagctgacttcgatgcggtatctctatatccatctgctatgagtgagctcccgggttatgtcagaagcaagggaaagcttttcaaggatttgatcccttctgatgcggactactacgtcgctttgagtctattgatatcaaacgccactttcctctactgagtttctatgagaacggatctcgcaatttcactaatgatattgtcggccaaaccatgattgtaggtaagcaggctctcgaagacattgttcgttttcaaggagccatatacacggtgatcgagggtatctattggaacgcaggtttcaccgaccagatcaccaagaccatccgaaagatgttcaacgctcgtctcaagtacaaagcagaaggcaatccgcttcaagcggtactcaagctgatgatgaacagctcgtacggcaagctcctgatgaagtcgatcgtgaagaagaaggttttcgttagtggcggcgataagaagatcgatgcatacactcgcaagaacattcatcgaatgatttcgagaacgccaatcagcgataatctagctatgtttgaagagcacaaggctctgagtcagcatttcagtccgattcatctcggtatccagattctcgattcatccaagcatatcatgaacatagtcatgtgtttggcagaagacatcaatgtgaacatatggtatcaagacactgattccatgcacatcgactacgatagtgttccgcgtctagcagatgcaaacagagagctgtacaatagtgcgttaattggcaagcaaataggtcaattccacgtagatttcgatcttgctggataggagggcaacatcttcgccaaggagtcaatcattcttggcaagaagagctaccttgacgttcttgcctgcgatggcaacgatgcgacaggtcttcatatccgcatgaaaggcattcccggtaagctactcgagggagatgcacacgcaacataaattaagctattcaatggtgaatcagtatccttcgatttaaccgagctgtgctcgattaacatcaactctaagacacaatcagtgtctaagcgttcgaattttacacgctgtgtttcattcgtgtaaatatagagcagagcttactcacagccatggactcactacttaaaaaatgtattttgaccctaaaacaggttttattggagctgacaagctctatcgtaaggcaaaagcatttgataaaaatatcattaagaaacaagtatctgaatggtacaagaagcagcatagtattcaacagttctcgtctcgaagcaagagatttcctcagttcaaaattgcatccaacgacccctacgaatggcaattagatttagcattctgggagaagcaaccaatcctcatttcagtgaatatcaatagcagaattggtttagctacactattgaagaacaaacgagcagatactgttcttaatgcgattgaagagtttgttgataaaaatgaagtttcagccatattttctgacaatggcagcgagtttatcaataaatctgttgaatcgttctttgatgagcgctctattagtcatggtaattcgattgccggcgaccactctgttctcggaaaaatcgatcgtttcatacgaacgatcaagtccaaactaaccaaaatgaaggaaattatcaaattcaagaaactatcacagtcgatattgaatgaggcaatcgctaattacaataacacttatcattcagcgatcaacgcaacaccttcagaaatgagagggagagcaatgctagatgatgttgagtacaacaaacgcctcgttaaaaaattaataccgatatcccaccaggatcgatagtgagatatcgctaaagcaaaaacgcctttggataaggaaggagccagatggagtagaacagcttatgaagtagttgggttcgatgggttgaaaattcgcatcagatcaaaaaacaaccatattcttttcagatctccaaatgagctaaaactagtcaacgcaaacccatctgatgcggagatcaatgaccgtgtcaatcaattctgggaggtagagactatattggatcataaaaaaatgcgcaacggcaaatacaaatacttcatcaaatggaacggatatgacgacccgtcgtgggagtctcaggataatctacgcttgatcaacaagaacgagcgcagtgcgttggagaagaagtattggagcacagctacaagttgaggctcttgaagttccatttggtatcccgaatcgtttctactttctcgaactcggttgtcagcaatcgtttgagctcgtatcttgcgatcatgatacgtcgagcaagctcggcatttttttgtgattcaacctcggcatcatcttcgatacggctattgtcatagactccggatgtagctagatcttctgaatcaatatattcaatttcgccctccatcgtaaatttatgtgattgagtatatatatagattgcgataaaaatacgatgacatcatgccgagcactcactaaaagcgacaccccatgctctcgcaatgctcttaaaatcggatacagtgctcagcacgacaaggatgctaagattagaatgtaccgcaaggagctatcaaagatgcacgagcgcgttcgtcgatatttggagatcactaacgaactcaacgataagctctcgatcatccaaaaagttgatttctacaagtctgaattgatgaagatcggaagccatgatagaccatacagaggaatcatagatagctcgttctacaaggccgaaattgaagatttatttggcatgaaagcttctgctgctcatgatgagtatgatagactgcttgcgttacggaatcaattggtccatccacatacactagatggcagaaacggctctaggacgggggctttgccccgcgtcaaaaatatgggtttgcgaaaacgatatcaggtagactataaaagaacgatgtttccatcattcaatagcctatctgagcgagagcgcaagcgccaggagctactgcgcgaggctgaacgcgagctcgctatcgataggcatctatcgcagagatatgtagagatcttatgggcagccgataacgaagcgagtactatccctgtagccagaactacttatggagtcagcacgcaaacagatggtacgcaagcagcgcccgctgcttctgtagaaaccgctactacgccagtgagcgctcctccgtccgaggcatcagctgatacagttgtggaaccaggggccttctccgaatctgatcgaatgcgtgtcgatgctgcgttgagtgcttcaccagcaatgccagctcctctcagtcctccctccacgacaacggatcagtcgttggcatacaataggctaaaatatctgtttcaaaagtatcctgagactcaagcatggaacattccaccaatttttcacgctatttctaaaaaacgtcaatctacttacctcatcgggaaagacatgtcatacttcacagcgcgcgatcgaaaggtagttcccgaaaatcgtgtgagagagttattctcagaggtcgattgggtagcaaccatgaactgggttgaagaacagttgaaagccaagggtttgatgcctaagaatgtcgataccagtgctctcgatggaatggttgctttcccaggcgaacgacccgctgcagaggcatctgctgacgaacgcaagcaatctgccctcaatcgaatgagccagctaatcgataagcaaaatcaacgaagagctttggatatttataaaacgcaagctttgaacaatttcgggccgccgaaacgcccgcttgaggatagtgctgtctctggcatcgatattcaaaccaagcgtcagaatatgatggagttgagtcgagtaggagcttctaacgaactaatgatggagtcggtaggtaacgctcgtaagaacgttcaaaatatctatcagcacaatccgtggctcgttagaatccatattccaccgacgggggtcgatcgcgtaaagaagagccgagagcaactctctgggtattatctagatgctagcgcggatgtttacaaaatgaagactccgccaaacgcgtctagcaacgacacgcgccttaccgatgctgcaataaaatattgaatattagctggttagctacgtttgaggaccatatttgctacctatacactgttatcgatttgtatgaaactcatccggacaagatcgatgaacatcgtttcagaagcaatctcagagaggtgaaagcaacgctatcatattatggctttgcagttgatcgcgatgaaccaatgcggatggaggatctggagatgaaaccagctgctgtcagtggtcgaggattacgaggcgccggatatgtcaagcgcatgcaggacctccgagacaaggatggacgcccgatcaagtatcactccaaccgaaggtagaacctcgcgcagctagagggctcgggaaccgcttctgctcttgcatacaagcggattggtaccaagtttgtgcatctaccaaagctcaatgacggtctcctcaaggttgtatacccataccgctcgacagtcggtcctcagcgcaagattagcgatgacctaacaaacctaatcaagaccttggtattcgatgccaagatcgatcaacagctctacgactcgatgtccgtggatgatcgacgagtatttcacgagctactgcgtatcacacatacccaacacgcgctacgcgatccaatcaaggatcctcgcgaggtactgcggcaagagtacatcaaactgagaggagagctaatgctcggcaatgacaacccgagcctgatccgcgaactcaagtaagtattgatcgacatgtattcagcaaagctgatttcggataacgatttcaaggaggttttggttgctattgtatagaaatatcatgatattcatcaatactagactcgtcgacacgaagaagcgtaccagcgcaacctagaggagctgaaatcgctcatggagaagttggtagtgaaagacccgcctacggctgatactacgtttaaagcagctaagccaggcggtagtgtatggacatacactgaaccccaaaaaaagccgcatgtttaagctgtaagctctctaagcagagcaagctctttttttagctcctcgatttgaccttattgctcttggatcgctcgcactaaaaccgatgtcaggctagctagatcaattccccatgggttaattggaaatccttcttgatttgaatcatcgttagctccgatatcaactgcctctcggacgatttcgtataattcttgcgctatgaatcctacatgagaggtacgctcctgtatcatagtgaatttccttggcttcatcttcataactgtattcaggccacatggacagtctacaatgtttggctttagcctcttgtccgaagcattagtgtagctaccacctcgcaccggggtatatgatacccaaatatagttagcatcgcagctccctagtctgatagcacctacggtcgagtcagagccaatggcccggctccaattgaaacggtacctagcgaagccatctccgcctcccttgatgtgcatgaaattgttggtccatatctctccgccagagtgtatggtagcttctggcgatgtgacaccaactcccattcgtccagagttgttgaggtaagcaatagtactattgtttaccatgagacgtagaggattgctcgtagtagtgccgagagcaacgccgttagatccgccagccacatcgttgtagatctgtacctcgaattcgataggggtcgattgatcattagctatgtgcatcgcgcgctgccagctaccggatagtagattagcgcttgatgtgatatccatttatgcggttgatgtagatgatccaaaacggatataacctgcctgagtgatacgcatgcgttcagacattggtgataatgcattagctcctgaccttgtactgattgcaaaatcagccattgaatattgagtactcgtagcggtacagtatagattaacgctaggggtgtacgttgtcatatcactagtaccttcaatcgtgaacgatattccggcctgagcaccaacagtattgctttgattgcgaatactaagattgaaatcgcttgccctcgttgtacttgaaaacgtcgtcccaggcgttatcgatagaatattcgtttgcggcgagattggtactcctccaatcgtgagcgatgaacagttgagcgcgccattgacatctagaaggtagctggtattaatagatgagcctccgatattgatgttcccgcttgtgaccatgatcagacggtctgacaaagcatatttgagaaagaactgatttgctcccgaggtattcgctgacccgcgaacacccaattcggcctggtagaagctcacaaagttcatgctagctgctgatgtagtagtgtcgttttgaatgacgagagacttcgagagacccgatccaactactgagagggatctcaatccggtaataccatatgaagcatcagctaccagcgccttgcttgcctcaactgttccttacttttggcgtttcgcaaataccgatcagctgctgatacacataaacggcaatctagctataggtcaagctagtattaatacggcctataaacttgatgtatctggagctattcgcgggtctagcttcgttcaaggaagtactacttacgatctctctcttattcctcgactatcactaagtacgtatgccttgctccatctggtaatagctcacgataatgagattgactgtcgatgtagtactatcattctgaatgaccaatcctttgctaaaacagaatttatactcaacgaacctggcgttccagccgatgtgatgttaggctgtgccgcggtttgtagcgtacctgtaatagatgtggctataagcgatgctgacgtaccaatcgatgtgctattaggctgagcagcggtctgtagcgtgcctgaaatcgatgctgcagcaattgaattgattccggtcagcgttcggttaacaccggtaaaagagagattgcctccaatagttagttcactcagtgttcctagcgatgtgatattgggctgtgcagcggtttgtagcgtaccagtagtcgaagtagctgtaagcgatgataggcctccgatttgaccagtaggtccgacgataagcgctttactattgcttgcggtaccagggctcgcgcttagtagtgagaggctgctaagatcgacgttagggccgttcagcttcatcgagctgcaactgatcgaattgatacctgttatatcgagattggtatcaagcaccagggctgacatcggactagccactcccatcgtgatcgagctgagataactcaaccgagagtcagtcttactgagatacaatgaatcagccatttcaaggcttagaacatctgtgcctaccgcatagaaggttgggttaaaaatattcgattcttgagatggtggccgagctgtgaaatccattttttgttggcgagttatatatcactagatatatactttccacaatggttaataggattgataactggggagccgctctcccgaaagagttccgctcagactctctcggcgatgttaagcaactcgggattaaaaagctcttccgcggaatcatcctagctcccagcaacgccggtaagacgaatctatgctatcacatcgtcaagaacgcaccaaacgtttttagccatctgcatctgattgcacgcaacccagaccaggatttgtataattatatgaaggagaaacttgcgggatacataactgtctatgacccatcgacaccgccaagcgtcgatgatatccagaaggatccgcgaggtggtattcagctcgttatcattgacgattattcatcagacaagaagatccaaaaagacctattcagtcattacttcatcagagggcgccacaagctgctatctacgctgttcctgacgcattcatggtttgctactgacaaacttataagactaaatagcgaatatttgtggattctcaaagcaaacagccgacgcgatctgaagatggtcatctctgatttcagtctgcccggtcttacgctcgagcagctaatccgagcctacaatgcagccaatagagagaaaggtcagtgtgtgacggtcgataacgttaggagcgttctaaggtataatttcaacgaaaagccgatctatctaaattagcattcggcaagaggcgcgagcctcgagccaaaggctctaagcttgcttattgagcaaggctctaccagggtaataattaatatcgaccgaatattataaatattgacatataaacaaccatgtcaaacatcatcattctcagctcgcagcacatcgtctctaacggttacaacaacaccctccgctatgagttccctggcagcagcgttaattttactaacagcgaattggctattcactcaatcaacatgtacaacagtcaattcaatatcgatgcatcagcatatggaaacaatagcttcaagctttcaatgcccacaggcaacacctacagtactgtacagatcagacttccgagcggatactactcatatagtgcaataaactcagctatgcaatcggctatgatctcagcaggtgcgtatctaatcagcgctgatggcgataacgtattttacgccaatatcagcgaaaacccaacctattactcgtgccaagtcgatctatcgccggttccgacgagccttcccgctggatggtctcgcccgccttctggtctctactcgagcggtggaaccggcctgccgcttggattctcgtatgtccccaagctcgttatcgataacgaggagtttggcaaaatcatcggtttcccactcggaacgacccccagtcagagtctatacacgcttcagtctgtactctctccgattccgcctcagatcaatcctgtcagctcatatcagatgcagtgttccctagtatcaaatccattttgcattccagacgatattctcactactttcaacacagcaggaacgactatcggtcagctagtaagctaccagccaaatgagttctgttgggtcgatgttcccaacggatcatatgctagcatcactctaacgatcgttgatcaagagggcaggttcgctaaattgaacgatacaaacatgctgatcagtctgatcgtccggcagaaacgctcgtagcgggttaaaaaaacagtgaggttttttttttaactatgaccaacggaagcttccagttcgcttagagctaccacccttgcgcatagcgcgaaggcgagccatcttcgccttcatctcgggggatcccttcgctgggtggctacggcgagagggtttagcctcagcaacgccgatacctgtaaatcgcttcagagcgcctcgggcaacacctacgagagcagggtatttgccttggctcgctacatacgccgatcccatgctggcgagaccatccgcggcagcggacagcgcaggcttgattacaggcctccaggcactcttgatgccgttccacaccttacgccagatactcgctccgtgcataccagagccgctcttgacctccatagggtattcgatctcgtgtttggtgatcttgactcgagagcccttgccggcctttttagctcgcattaccttatcatatgattcggggtgcagatgtagcgttgcaccagagccggctagatcagccttagtcagcgataggttgccagtcttgaccgcactgcgaagacgcttttcggggattgagttcgaaatggatagttccttgtacatcgtcgttaatagtatagttacgcagggatttaaaatttcagaaaattaattatcgattacgtcgatatcgtgatcagtgaatctatccattagatgcatttgcccatgctgcttggcgtataaccataacaggcagaagattccgcaatattcgtccgatgagccttggatttgcttgttgaaatatagcagatcgcctaataccttcggcggtccgacagacatgctatcaaaataactaccatcacacacagcagtccaatggccgattctcgggctcgtacgcagtaggataagatatgatcccttcgaggtgagtggcttccggatctcggaaagctcgtatatgccatcgatccggactccaatccgcttagcgagcgcgagcaagttatggtctgaggtaacgcctttaacaaactccaatctccaattatagtatcgccagtatagacaaattaaagcccccgtaacctggacatcttacgttttcaatcaacatattttgatctctccaatgtccagccagcaatggctgtagcctccgtcaagagatttgaacacgaatgcgtatcgcgtgctcgttacacctatttacccactctgattggtttaaaatgcgtctgtcgttggcctcctccttcactggccctcacaatttgactccctcaacccacaacaagcagctgacgatgacaagcaacctgtgcctccctgctactgctggacctgtattacagactccgtcccgtggtcgcctcgatggagaccaagttcgaagtgcctgcactgccgtcaacacgaaaaggcgtaccgaagctatttaaagggcatatctacctgggttcgcgccactcgccaggatgccgaaaaattcttctgcgaggacggcagtcttaacctcggcgtgttcctacctacgcacttcgaagcgttccagctgtgccttgcttccctggtgacgcacgccgattttcttcgccaaggtctgctaccgaagcatgctttgctttcttcctacatctttcgcgattccaatgtcatggcacgactctccagcatgctgattaccggttgcagtacatggatgcgccctactggtatacccccacacgtcgagctttttgagcagcacatgaagacgcgacaggcgctgaaccatctcccggatctactgctggacggatttgctaagctactggacgagaaatgcgtgagtcagcaggtgcttttccacagctagatgcgctaagtgtgtggcgtatttggtggcttggccaccctgctgccggatacccgccttttcgggcgctgcagccatctgacttcacgaagaccaaccgcaagatgttttcggaatggacggtggtggtccgacatatcgtcgctggtgtggaggcaagtacaggggcgagaatgcagcgaccaacttcacaacgtgaagccgacgatctctacgaactcggcatagctcatgtgccgatgaagccgcctacccatgcgacgaagcaacggcccgagcgagcagtaaccacactgcgacgaatccggcaggcaatccacgagtcgaatccggaggcgaggcgtgtgccatgaagcgcactagaagcaccaaatagaggttaacagcattaacaaggcgttagtcgtgatggcgcagcacattagctcgttcgatagatgcttgttcgtcttacctcgccgccgttcccgtcgaagatgcacgacaatgggatctggcgccccgcagagtgagtactgccctgtagtgatgagaatattagccaatcaggcgacgttcgttatgcgtgtcacgacccggttacgggatctggacacaagtcattaattatttttttgtatggactatctatatcagctgacatatacttatcaccatgtctgacacaactcaattaacatacgcttatctactccagtcggctctcaagaccgaatcggctatcgatgtcagcaagggcaagaccatctcggttgtctatgatggcaaccagggttcttacaactctggcttgattaagattgatgctacttctcagcttaccggatcgcgtggatttgctagcctcaagaaggcgtatctcaccctaccgtatgtgattaccgccaaatcgactggcacggcggatctaaatgcgaagactattcctcgatttgcatgtgcgctcaaatgcaacgttgccaacgttattgactcgctgacggttgaacttaacggcaaaaaagtaatcactgaaattgagtacaagggcttctggaacaatctccgtgctatgacggaactttcgcaggacgaggtagccaagcatggtgctgacatgcatctatatccggatacttggtcgagcatcaacgtcaccaaagctgtttctggtactggagatggctatagcaacaatcaaattggtattgaagccaagcttgataacactctctcgcaaacacaggagccgtatgctcacaatcctggatttttcaagcgcgcgctgaatactcctcctcaaatcgactcgacggaggcaaccggatctttctcttgggcttccatgggaactactgctagcaagcaaattctacaggagaatggtcgtggttgttttagggagtctgatgctacgtcgtatggagttgataaggtcgttggtaagtggtttcacatgcttaagatcagcactcgtcgatttgcatccgatttttaaggagccagatctatgctgtaacccgcagttgaagatccgtcttcgtatcgatgctggtacggttgctgtatctggcaacgtgaatcaaatgaagcttgattctgtcaccatgacctctggtcagacggttcctatcatgattacaagtgctgctgcggctaatcccatgaatgatgtgctgactactgctagttctcagctgtcgttctcgttcggcccgcttggaaatgcatttactccgactgcttcggtcggtgagcatctcccatacacgaactcgaggctccacattccgttctacgcgctcaagaaccccgcgccaatcatccagaagccgatcaagactgttcgctaccttgattgctttgcacaaatgttccgcaaagccgctggagtgtctcctgatacccccactggccagccgaatgctccgttcgatctcaacatctctggatacaagaagaatgtgaagtaagctttgatccctttcagtgaaacatcggctggacacttcgtatcgcttagtggtacgcctcagtatcaatcgccgtttgattctgcaccgtggacctgtatgcctggcgcttccattcgtaatttccaggtaaccattggtaataccaacgtcttcgacaaaagccaggagtacgattttgagtcgttcaagcatgagttcagcaagctaggcgccatcaacggagatttgaatcagaaggtcagcaatggtctgattgactcggttcagtgatcgatggctcagcgcattctcgtagccgatacgtctcgtctcacccagaaggatgtacctcaggcgattcaggtcagcggcatcaacggctcggctactggcatggatcttctcgtactggtcgtatacgagcgtgagcttgagatcgaccgtctcacgggagaggtccacagaaccgattaagcatctctcgttgaattgaatttattttaataagcgagcttagagcctttggctctaagcttgcgcctcttgccgtcaggataataattacgatgtggcctagaattccattgcactagtcgattgacacctgaaactgaataatttggcaaatgggttcttgtaagtccactctcataattgattaatttatatattttcaaaagaatcatgtggatatctatatagatagataacaatgagtacattaaattttggcaagcacaaatcgaagactattgaggaggtatacgagtctgaccctggatactgccgctggctatcgaatcaaaaaggtctcgttgcacatagtagtgactttgccaaattcctagcccaaaaatttggcaatgacgatggatcgtatgtgatgtccttcggtaagtataagtcgaagactattaaacagatccaagccattgatgctaaataccttgaatggttgagcaagaatgaattcgttcagaccaagatgcctaagctgaaagcagaagttgatgaacttctaaagtaagcttgtgtctaatttttgtcttaaaagtattgacatcatttatgattaaaatagagatgtcgctcacatttgagtaaactgctgatgcttacgcgatcgacagtgttgtgatcggtttgaacttcgatatgaaacccgacatccacaatcaatacgctctgcgctatgatcttgaatctcttcctttgttctaagtgccgcttgcttattaataacaccttgagttgagtcaattgcaagctgttcaaaagacaacagactttttcgatttggtatttcatgctcactaatcagtgaaattgtaaagttctcaacaccatgctctcggaaatggtagtaaatagctgttttgctaatatctacaccattaatccaacgcctaaatttacatttgtgctccgaaaatcgttgccataatggttttacagtactcccaatatatactattgaatcatcagcgttggaaatcttgtagatgcgaccgatcatggttgttggttggttgctgcagtgtatgctcttagggtttatatacttaagatttatctcttaagatagaatgttttttatttgtgagctattgagaagatgtttggacaccgtgcgagaaggaggagggttattttaatctaatgagataagaagtgttctgcagagttttaaagagaagaacagaaattgggtaagctggggttgtggttagaggaatgggtctctgagtgttcttatatcgggagaaaatgagagtggacacaatgacccgttccgggtatatactgccgcagcttgagattactttgaactcgttgctgtggcgccgggagtccgcctctgtgctgacccagtttccggccgggcgcttcgcggagaggctcttcttcacgacgtccctgctccaccgtatcctcgaccgggcgcggcgtggcgacatccccattcaagggccggttgccacggggccagcctgggatgacctcgcagagagactcatgttcgcgctcaacacgtcgtttgatgcaacccggctggacaccccattctacctggtccatggttgggatgccaagagtacggtctcagctatgctggggcctaaaccttccagtgtccctgaacggaccgcgtatgagtggcgaaggaaactccagcgagactacagctacgctcgggcatgtgcagcagacctccagaggaaggccaaacgggctcgctcggaagagcagacccggaagtggaacgagctgtcagatcggctcaaggcaggtttcaacgttggggatgcagtctggctgtacatcccaaaagtgcagccaggtctgagtcgcaagttggtccagttgtggcatgggttgacgagttccgggtgaggctcaaggtcgaggacacgggttaccgcgtaaacccttgggttcccatcagtcggctgaaaccccgggcgttgtatcccagacggcctataatccaaccggagatcgaagacgacgatgacttcgacacagcgctccttccctaggacagttgggaagcgggcaacgagaatgacgagtacgaagtggagaagatcatggatctcagttggaacaagtgtacacggacgtccgaacgggcacgagagtatctcatcaaatggaagggatatgatgagcctgaatggataccgatggcacagctgaattgcggagcgctcttgtatgagttcaatcaaggggcgaaagcccgagcgcgtttccaagccatgcaggctggggacgaccaccctagcatacaatagttgggagtggtcaagtccgaatggggcgatcccaattgggagtattgatcccagttggaaattcccagacggagacccgaaattcctggatgtgaatgtgtgaactacggagaattgattgtgaatttgtatggagcggatctacgatggagttgtgactatggagagtaacccgagcgagattggagttttcgatgacgagtgtatgaggttgactatgctggcctgaaggagatgccaaagcggcaagagaggaacaaaaccgcgcccaaaagttgaaccgacctggataacctgaccgacgaaggatacgatgaagacagcgaagacattaacggtgattgtggaattagagtgttacgctacggatatgcaactacatccaggactgttgtggatgctggatgggatgacctcactggaacttggtcgcgacccagttgtcgacgcgctcgtgctcatggagcagcttcttgtcaacgatattggctgggacgtgcaccagacgctcgtcatccgtgcaggtactccactgagtccggccggggtcttcgagttcggccctcgcgatctggtcagccagggtgtaacgcgtgccatcgaccttcttggttgactcgtcgaccaggtacatgtagcagatcttgcacgggtacaaccagaatccaggctcccagaccatcgttttcggcatgccggccttgatcagacgcttgattccggcctcgaaggtccgcgcaaccccgtcgtggaacgcctggcgcttgcggtggaggtcttgagcccgttcgtagatcgtgaggtcgtcacacttctcgtcgtcttcaggcttggtcttcatcatgaaccagtacaggatgtgccagaaggctggaaggtgatccttcatgtactccacatgttggtccagaatgtggatcacaggtagggataggtggccccggcggtggaagtacaggaccttgacccgcttgttgaacatctccagccagggttccttcgcgaccagggccgcatactcatcttcgactgagggccaacgcctggccaagaacttggtctcgggttgatggggcgcgtagttcgggaagcccggggtctgcccttcgataccacccttcttgggagcaaaccgagagccaatgccgcgactacgccacgagacaatatctccggacgggacctcgatgatcgccaactcttcggcagtcaggtcctcataggacttcagagccaggggcgacttgccgccctcccgtttggttttcgacgtacgactgcgtttcttcggatttttcttggacgatgtccgatcgggcttgtctttcaacgcaaacttggaccgaggggactggggtgttttctgggacgacaaccggggaggccgacgctgtgacgaagaagatgattggagctcgtcctcagatgagctgtccgaggatgactcgacgcggttccgcttaggcttgcgcttggccggctgttcctcttcctcgctgctgctcgaagagctgctttcctcgacggactccgccttggagggcccatccgcgctcttcccagatgaagatgccttggccttgccctcgtagtcggagtcactggagtcatcgctttcactggagtcgtcgacttcgacgatttccatctcggcagcagcgtcctcggccaggttgcgtagtggcggaaactcctccggatacatacccgaccgggacgaccctggagcatgacctcggccatcttgtagaaggtctcgggggcatgacgcgtccagagagtgtcgtccagggtgccatgatacatcatcttgactagcatctccagcaaccaaggcttggggaaatactggtgggccggacggtcctgacgggggatgtccaaggtctcttcgtacccattttccatccgcatgacaaactgggcatccagccgggcatccgaccaagagacgaactccggcagggatgcagcacagtcggaaatcagacgcttgaagtccgtctggggcggcagagggagcacatcagaccccggatggaccgggggtcgcatttggacgtacaccggcccacccttgctggaaagctcggccataccacgtggacatgaccccgaacgtgatcccctggacgtacgccgcttggacttggacggagacccatccgcaggggaagtccgagcggggaggagtgggtggattgtcctccgacttctcttcacgatccccatcctggcctccgttgccatcgcctgcctggtagttgtcgtcatcgtcctcgacgtccgggtcaactgggcccggatagggcgggatcatcctgaacggacggtcggcagcctcgacggtgatgttggtgacccagtgtgcgggaggaatggacccccgttggaaatgccgaagcaggcgcaccagcctaggccaacgaccgcgagtagcagccccacctcggttgaggaactgcatcagccggtcggcgtcgaatgcggcctcctggccggagatacgaagacgttggacggccaagatcgcgcgctcgagcttggcctcagcctcggtgaccttgttgcgttgcgcgttttcttccaccagatggttctgcgccgcgagcgcgaaatctctctccagctgggcttggagctatttccggagtgcagccacttcccgctggtgatacatctgcaagaagcgatgtgcgtcgaggagcttgtcgtacccctgctgcagggtggcgcccccgccgggagatacctcacctgtcgtgaaggttccctcagagctccacgacgcgacaggtctctcactgtgctctcttgcggtcggcgaccttccagccgactgcgcacctgcctccgatgcctcttggatcgttagcccgtcattggaagtagtactcccgggtggcggcaccattgtggagtagcggcctcacagaaatcgcggagttcgtcctcgcacaaacccgacgcgtccaatctgcggtcgcgacgggcaatttcccggatcttgagtaacgtatcttcgaatatagagcccaagtcttcgcaagcttcagagttggggggttgagtggacgcttgttccttgtattagggcgtcggttgttccttgggcgtgcggacttatcgggccggcgtttcctggggcttgttgcgtggcattatcgggccggcgcggtgtcttgtgcacagcggttatcaggccgtgcggtccttcgtctaagctgcgcgttatcgagcgcctcctaaccggcatacgttttgcgtgcctttgtttccgacacggggtttgacgggggtgagtgtccgagccagcgagcgacggggggccgcgtattccttgcggctctgcttgccgacgcttggtggttcgtaagaacctggcgatcttccggaggggagaggtctgagtggttcagagaaatttcgggactgagtccttaccctatcctatgtccttgctactggctactctgtactaccgcttgctaagcctaccgctctgtacctatcctaacttatgtcgtgcttgcgctaccgctcttcaacctgatttgcgcaacgtaatcacaacttgagctcgacgggatttcctcgatggggttttctcgacggggtttagggttgacgggtttttggggtcgacgcggtttgcatgaccgggcgtatgaaccggctcgtcgaatcagccagaattagcctgattccatcgccggtatgcgtgtcacacgacccatcatcctgttaacctctctggccattccgacgcgtcgtattccttccgtctcgtcggctgccgtctttcccggcacttcccgtcactcgttccctggcgcgacatttcgtggggtgctattccacagttctattacgccaaattgcctttttacaagtgatctaccttttcttttataaatttcataaattttaagtatgttgctgcatctttcgaatggtaggagccagtgaagacgactctgcagcaataatagtgtagccttgtcggccgccagctcccaacgcgttcctccgggtgttactcattccaaaatgcactagcataccctcgtggcgaacgcatcctctgtgctcacgatgacactgtaaccaactcaatccgtcttaatttctgatgtcgggtttgaaaataatacattatcagcacttagagattccatatttgacgagttttggcgagatatggttaggacccgcatccagaagggatggacagagctcggaaaaataattattttatttattgagtgggtcaactcgcgtcaataaataattgggcaataaactattgatcatcaagtaaaatggaaaaagtaatgactaggtcatgacccaatgacctggtatccgcagatacagccgttctttgggctgttacctgcgggtatcagcgtttgggtcatggcctaccgaaataccacgcgctcaggcaaataatattgaggtatttgctgcagactctgcgccgtccataatattaaggtatttgctgcaaactctgcagagtgaactcgcacccgtccatgcggatcagatgacatgaaggagacccacgatgcgcgccctatgcttatgtctacgtccaagcaccgcgctctgcggaagcagagcacgcgctcctggtgctcgctccgcgccgacgtctggggcacctacactaccgcacgtcgtccaagccgtctgcgtgctggtgctcatcactgtcaacgtggagctgtccatggcctcgccgatcggcgccgagcgtacgctgaagctgaggtggcggaatggaaaactgacacattctcccaatactgaccagtgtgtggttgttgttgttagtgtgtgtggacgcaacggtgacatcgtctggctggtacgaggtgtccctgtatgtgtcgagggcactgttcacggtggagtagcctctccagttctgatcgtgtcttgagatcgatccccgcgcgcacttgagacgcacgaaatcctgctcattgttggggactacaagaatgtggccgagaacgcgctggcccaaggattcgacggcgtcgagttccactgcgccaatgtatacctcattaagcagctcattcaggacggcatcaatgaccgtacggacgagtacggcgggtcggtggagaactgcgcgcttcccgttcgaagctctggacccgattctctaggttgtagactcgggtcgagtcggcattcgactgaccccgtacggcataaacttctgccagttcaagtccgaccccgtcgacttgtacggccccgtgctcaagtgacttgatgcctaccacctgggctactcccacctgatcgagccgcacgcgttcgagttgcacgagaacccgaacgtgcccacggactgatgcatggtctgcacctcccgcgagatctgtgacggcgtgatgctgacaggctcgggctacgacgacgcatcgatcatcaagaccatgaagtggatgttttggcccatgtattttgattgagctcgtcgttttactccagttcttaagcagtacgtggttcaccgcgaggtagggaagaactggagcgtacaaacggacggcgtcatcacatgcaccagtaactgctgatgcagcaagcagctcgcgagcatcaacggcgagtgcatcgacacgcaccacaacgacgtcggttctgtcgtccagattcgtgtcgttgaaagctgtggaggagatgcacggtggcatcatagtgctgctcacggaggccgtcatgcgcagcgagaaggtaggtaagatcaatttagagaacgtgaggatacatccatgatggaaaaactaaatgaagctaacactcagatcgttctcttgctacgtaggtgcttcgagaatgcgtcgatacttcgtttcccttgatctgtgacagcgttttgagcgcgctttcaatggatagaccacgattaactagtgaacgtacatatttgatcacatagtgtcgtcttgagtaaaacttggcttcttttgacgatgaacgccacttgcagccgtaggtttgatcaaggtactcgatggatgggtgagttgataacccgacatgccattccgtccacagctcactaacagtgctgatgcctctgctcattgaatgctgtggtatggtagtgcttgctggattgcgaatcacgtcgctggtggtgctgtcggggacgtcgctgcgtgcaggctcagaagctccgatattcagggtaggattagctactggcatcaattagaaactcatttattcacgtaataaagaggtgaggttgctgttggtctcagagagtagccgtgcaatttctacatgtcgagtctctatgccttgcattactcctgtgtgttgtctcgaaatttgctcggatagcaacggcatggcgacttgaagttgcatctctagcggcggtttagcgcttgctgcttctgctagtgcttgcgtccgaacgcgataaaatgcctcccccaaaatgtgatggtagctaattcgagtaggaagcaggtcgaacaggacagcacagtcttgcagaaatacgactcgaaggtattgtagcaattctagaaaacccgcgctctcacagacactgctgccgcatacgagcggattgagactcccgagcgcttccccatgttgatgatgttgtgttccttgtgtctagtgctttatgattatctccgaatgaaaacagctgaaaccgatatttcgattaggtcctaaatttggtgttgactcgggtcaggacccaaactatagcaatcgtgatactcataaagtaaatcactaatcggctacctccgctcgttatacgaccactacacgttctctcttgccagtcttgagtgcgcccgctataagctcagcgtcccaaagcttccgttgagctccagcatcaccaacgtctcgagagtcgttgggtgcaagatttgccggcggtcggtcaggactaatcccgtcctcgcgaataaatgttcaatgtcggtagaatccagcgaaggtcgatgagcgtgaaagcgtattgcttttcacccggaatagcctctctgcaaaagagagattctcgccctcttcatcgtcacttgcatcactctcttctctctacgaaatcgtgagagtgatcgtcgacagcagtaccaacgaacgagtcgagggttcttggatgcactgctcggatctcgtacttcgagaggtatgatgtgttgtggtcacgtcggaggtgcataaacgttctagaatctgagaaatactgattattggggtcgacctgtaacgggccaggtgtgtgtccgttactagcttacacgtagcggtgaggaagcatagtttagactcggatttagtgagaccaagcagtcaatcttgggtaaaatcaactctgttttatgtaaggaccagggcggttacccctggtctcatgtgagccactcaaatgcacttcatcggcccgttcaaggtgagcaaggtcctcggcgacgcgtacacactggacatcccgtcgtcgctgcgtcttcacccgactttctacgtcgggcacctcaaacgatatcatcctgccgatattccgacctctgatcaccaggattcactggcgggtaatgtacccgagactactcgcgacaccaacacccatcacccaagcctgtaccgtcgcgatggtcctcctccgattgtcgactcggcgggtgaagcgcgctggattgtggaccgcatcgttcaccacgaggacccatctcgtgcaaacgggcgtgggcgtaatccagtccgagctcctcgtgcgatcccagccgcgcgacgttaccgagtacgctggcttgggtttccacctgacgaggacacgtgggagatgcgtgcagctcttcttcgggatgtccccgatgttgttcatgactatgaggcgaaggtcgccgctgctgaagggaccacggagctcccgcggaagctggagccttaagtgagcgtgatgatggaagtggacccccaccgcaagctcgcggtggcgttcaccgcgaagactaagaagaaaacccgacgacgaccgccggactcgaaccggtgacctccaccttagtggcgcagctttcgaccattgcgctagctggacttcgagtccccacgacgacgcgcggacctgatcaagcttggagcgactgcgcatggcaatggcaaggaggattcgcgtggggatcgaacccacgcgtcacagctcagcacggtgagcgcttgcccacaacgccgctccacagatgattgccggtgtcgaagatgtccaacctggtctcgctgccacatcgtttcgagtctacggttacgcgactcttcgccgggagttacttcgaagggtcgtcgcaaaaagccacgccacgctgatcgccatcctgtgtctcgacactcgccgggtctccgctctgtgtgcatcacagttgcgcttgtcgtcaagctttggtatcgcttcccatgctgcgtcgtttccacgaccgccgtccattcgggtgtccgtggatgtccgcagccacttggggcgctgcgcgttgcttcggcgtgtgcgccgacgagatctcttggtgtgtgtaagcttgctgcgcctgcgtcgtcctgtgtcgctcggtagcacgagcgccgtccctccgccgcctcggtcgaccatggtgttcttcgggtgttctttcggaaatgtgtcttttgcgcttacgcaacgtaagcgcaacttcgagagggggggggggggtgatgtaatgggccccatttacataagtaggtagattgacagtacataaagtagttaagtcagtacacggctagcgtgtacggacggtcatcgtgattggctcaattgggggagccagaccccatttcagccaatcagcttgttggcaccgagggtggtcacggcggaggagcggatgccttcggtagacagtaacacacggtcacccgtgcgaaatgaagtcttgttcttgcgtccacgcttgtctgcattctccttctgccggtccactgcggcttgcagtgcgtctcgcacaaacgtgtgattgcttgatgctgctcacaaactcggaaaccaccaagtgatctgtgggactcgccgagaacttcggtgcatagttggcggtagtagctggttgctggatcgtcgctggagcgccagcggggtcgatcggagttcgctttgtccagtctgcgagcggcgtcaccgctcgcagactggacaaaatttgcgcttgattcagcgtggcgacgccggtgaattgacgggcgacggctccgccggcgtggtgagtcttcagcggtagctcctcccccaccaagcgtagaaacacgagcctccgtgtgttggcctacggcaagcatggcgggtacgcgcgggtggcgcgcggagttcacgaagaacggagtcatgcccatcgacgagtgctcggcgttgttcagagcgaactcggtcaggggcaggaaagcgctccacctcgggaacgacgtagcgtagctgcggagcacgtcttcgacgacgcggtggacgcgttctgtaacggggttacacgagagttacccgaagggttacgaagtgggtacacactgtctaacctaaatcagtaggagaatcagtacatggcttcagagccactgattatgcatatgactagggttcactatgctagatagtgaaccggatacatttacaccgtaggcggctttgccgcaataaatggaaatacattcagtttgagatttatacacttaagagttaagggttgactcttggagtccgtaaggcaccaactcctgcatccaacaccgatcgcccattcgacgtcgttcacgcggatttggtggggccatttactggggacttctactgcttgacggtgattgaacagcaatttcgctagttagaggtcctgatgcagcgcggcaagacctcggcaactacggcttcgagctttgagcgcgtgtggctctgccgttatcctcgcccaaaactggtcgtgcatgaccaaggacctgaattcacgggagacgagttccagctgctattgaccccgatggcgatcaaggacaaaccgatcaccgcaaagaacccgcaggccaacgcgatctgcgagcgcgtgcacttggaaattatgaacatccttcgcgtacgcccggacctgcatgatcagctggaagtcgccctcaactattctgcctacgccatatgggccagctatcactccgtacttcgagcttcccccgctccattgatgtttggcgaggacatgatcacgcgcgagttgcatttcgccaactggaacttccactcaaagcagcgattcatggccatcatgcaggacaacgatcgtgaaactatgcggcgactgcagcacttctatcgtgtaggtgacaacgtcatgctccgtgcccctgctcgtgaaaggaagaaaaccgacccagtcgccaagggcccgttcgtcgtgaaggctgtctacgacaacggcattgtgctcctcgacactggatcaagcgagtaccgagtcaacatcaggcgaatcttcccgtgttgatttaacagcactgacatcctggtatgagggataatgacaactccttctgcaccctgtcgacactagcgcctgtcctccctggcgtaagggttgacttcatctgggtttcgttctgggttcgtttgaacccttgctttgggtacacacggtgccttcaaggcgctacatgagtagtctagctgctaggagatgccaggagtaacttcattcaatcaatcagttctcaattcgactcacaggactcaagcggcttggcagggcgacaacttgtagacgcgtaaacagcttggccttgtcgctcattttaggaggaggggggctcgaacgttgtcgacaaaatgcgaagagagagtttgtggttgataccgactcggtatcaaccacaatgaaaaaatcgtaatctcactgacagagacggcactgcttagatcaccattcatatgctgtcgatcgccagcaatgttgtctgatcgaagtcaatcccaagatatgttgctcacgggaggtgatatcgttccccgctaactggcagttattaatagtaactgcagcgaggctatttacaaattcctatattagccgtacagatgctaaaaccaaaaacgggctgctggtacagaagtatgcttttgggatcgatttgcatattttgacaagcgttggtacttgttagcatagttcgtatgggcttcctgtttggagccccagacaagaactgcttcgcgagcgtactgcgctgtcgatagctccaccagctctgaaggcaagtcgaccacaacagtgcaatacttgtactcactgtcataagctgcatactaagacgtaagcacgattttacatccgcttaggttgtcatcgatcctctttggaagatcatcgatccgcttcggtagtgtcatcgatcagtttggttagatcatcaatcacttgtgtcgagcattcgtaagacagtttgacgacaactcaaatctagtgatttgattcgcgaatagtacgacttgccaattctgttggcactgccaggcgcagagtgctcgcaggttctgctaggaaggcccgcgttcctcttcgctactctttttgatgcatttcgttgcacttcgtatcctgactaatatcgggcgcagcatagtagtggtagtaacgattggcggttcgatagaactgtgcggaggagcgctgcgacaccaacaaactccctctacatatttaaaagaccacggcgagcttagatcgtttagatttcctagtactacagtagcaggccgagaaaactggtaagcgccttcagccgggctgatcaattactttagctttggcatttttcatgtattcccgagaagtttcgccgctcatttgactcttagaggccctcacgtcgttttgtagttatttgtttgcgacaccaccaacagcttacctacacgtggccgcgggtgaggtcggtggtgtccactaccgacgtaggtggagctgcagcagtgtgcgcctccgtgagtaaggtagccaagcaaaccgcaacaaatacaaatacaaatacaaataccaagactggctgacgctgccttgttgctactacaaaacagttcatttcatgactttggtaagatcccataatgtattgattgtctactccctcgcgtcctccgacaacgcctcggtgcggagcatgtgtgcgcgctcgtcgtgcactgcttcgctcggaggcgtcctcagaggacacgacagggttcgtgggccgcactaccggaggaagaggggctctatttggttatgcattaactagaattcactataaagccctgaacgttttgtttgtcaagctgggctaatggttcgggtgcatttatttcttaaccattctcaaacaagcgtgtacattgtagttggcagtagggccgcactaccgactacatgttcgtgcttgtgagcgccttatttcgtcggctcgactgtaggtggcacgagcaattcaaaaacggcaaagcggttgtcctcgggttcctacatgctcaacggaggaacgcacgcaacgacactatcctctgaaagttttggccaatcgcatggtgcaaattgttgtccgacaaactgtcttacgttttgacggacaaaatacaatgtagccactggtatactaaaaccaagatgtagccaaaatgcgttgattgcaaaacgtaagacgctttgtcttacggtaggctctctggggctaagtatcgtcttacgaaagatcatcaatctgcttgggtagatcatggatccgcattatcaatagagtgtcatgcatttggttggcctctcatgagcctgcagtcgccactattttgtctttttttctacatgtatcgtaaggcattttacagctgacgataaagatcatgtatatgggtttcgcatgacttctacctagctttcacgcctattctgaggtctaccgatagcattcttgcggaacttactggtgggacttagtaaaacaagacacaaccgaccactgctcatagcgaagactcaagccagctccccgcatacttacacccgagatagctaccgtcttccctcggactagacgcctaggcgttctaaaaaaactagacgcctaggcgttctattcaagtgaaactgcgaaactctgaaggatgcaaaaggtaggcgttgtattcaagtaaatctaaaaaacccgaaggttggtagtggcctctaagctatatccgcattcctgctacgtgcaacgcaaactgagggcccagtcgagcaaggcatatcttcccagttgcctcaggaacagtgtaggtgaactcggaaatcactttgcagttgtcgttcaaagttttcacttcaatgctgcacctgtgcaatctggatgctgcaaaaagctccaactcaccccattcagcagttccgtttctgatcgactcaatgtagtcgtggtcaagtaagcctgtcaaatcttcaagtcctgccatgaactccgtcagcagcgtgatgtagtcggcgatggagggtgcgaggctgaaacggaggcaacgatgaagacttgatttagtctcctccggtagataccactcaggtgggtcaatgcaaacctcttctagatcagcttcttcgtcaagcagagccttgtatctgcggtgccattcatccaaatcaatactcgcctccaacagctcgcgaagcggagggtggaggtcttccacatcaaatgactgtcgttgaacaaggccacaaactcgaaattcttttttgatgtcggtggcgtccttcatctcaatccagtccagaacgcattgagataccgttcgatagtgaggaaccttagggttaccctgctttgtctgcaaagttggatcgatcagcgctttgcctatatactcgtcgaatcggtcgttgtagaaagcttgaacgctcctgtttagagccacatcgagcggttggagtagattttcatgatcggcggtaccaataacacgaagatgttaaacgacgaaggttttgttcattgaacaaattcacgtgacatccatacgaatcaatgatgtaaagcactgactgccgataaaatcgagtctccgctcggccgcaaattacatgttctgcatgctccagcaatatctgatcgttccacatccctgttgggttaacatcaaccatgatgtccttcgaaatagctccaagttttggcttatttttttagctgggagaaaagcacatggggctttaagaatttaccgtctccagtaaccgcgaacgttgctgtaaagcgtttgtggctgccccccttccgcgagttgcgatcgtcgaattaggttccgtttcaaaatatcttgggacctggtccatgtttattatgttgcatggatcgatgtgatgctgctcaatcagagactgagctttctgaatgaactcctcgcacacactcttggcatcagcaggtagtgttcgggtagtcgtctgacgcctcgacaccaagttgtagcgcgtcttaaacttgtctagccaacccgttgaagccttgaaaagatgatattgctgctctttaaagccacgaggatgttgagatttgtagctggatgtacttgtccttgacccgcagtccctttttgtttcgcccatcgacccactcatgaagctgcacttcgagttgctggtattcatgcttgcgacccgcaccaggcagtcgacgcatcgtccgcgttgatcgctgtctgtccttcgcaacgtctttcatggcgcccaactgctcaacccatttccgaactatcgatgacgagggtatcttgtgttttgcggcaagggcggcaaacccaaagccgttgacacccttcttgtactctccagcaacactgcgcttgaatccgatactgtagctattacgcttcttcttagctgacattcttagcgggggcttttgtgtcgctggagggcgattgtatagtgatacgacgaaacgagaggccgacttccgcacgaatggttggcagtcggcacaaaggctctggctcgtccaactgacagcagaattgttggcaacaaggatctcggtcatcatatgccatttacaacatgtgctacattgggtaggcgttctattttgctatagcttcaattcgagggtgagataagatttgggattgtggaccaacctcgaatacaacgcctaggcgtctagtacgagggaagacggtagctacaggcaggctacatgtatggaagtcgttcattgtacgttagtattgtaccaacgattgtcagtactgctgcgcctgtccgcgctccccgctgcagttagcgggaagcccgctgtcgatatcacctcccgttgctcacgtcgatcaggttgatttgaacgccgaccaggttcatttgaacgctattcaaacaaaacttccgcgttgaaaactgtatacacccagctcaaaaacaaaactccaagttgcgtcggtacataccctttcctacgccagcaattccctacttcagcgacagcgttcacttggcaggacactcgcgcgttggctctcgcctcggctcggccaggcgcggtatctaaaaaaaatatcgggttgcagcgcagacacgcccccgccttatcggcgggtgttggtaatcggtgaatgcactgagtgagtctcgcgctcgcatccgctcgccctcgcctattttactactgtaggtacagacttactttggtgtttgaaaagctatgtgcgacccactcacttaaatattgtttaggtggtagctagctacatattcaccattatttgccatcccgattcactatcaatggtgccgatcggaaccatcgtcaatggtgatatgggcacagccggctgagactactacaccatttcccaggcagactggttggtttcccaagacaaaagggttttcgcacagacgaaaaagtgaaatccacagattgtgaaaatatgcgacaagtagcgcttctaatagtaggcggtagtgagcggttgcgaggagcgtagccgcagcaaacccgcgcggtatttgcggaggcgggcccagcgacgagcattccagcgaacggacccgtcgccgtacactcggagttagttttctttatgcgggggtctgggggtgcaacccccagcacaccttcaacagtgggcggtggaaggtatacatgtatcggtatttctgtgcggttccccttcagatctgtggatttcctcgttctgtctgtgcgattctaccgtcctcgtttcccaaccaaagtggttcaaatcatttttcgggaaaaacctcatatcacgtttctcaggtattttcaagcaaagtggttctgtcgtaaatcgttaccaagcaaagtggtttcacaatcgtcgaggatttagagccattttgaagaagtcaaaacgtagcttagaacagccatgtgaatgtatttagggggtctatcgtgatctacgtgacgtgggcattataactaagttttttgcgtcgaaaaatagcaacttttgattcttacagaccaagctcaagacgtggactggaccgttttagccccatatggttgggcaaaccattttgcttgggaaacaaacagctgtaaaccttgaaaacccccgccaccggatggtgaaaagtgcgccaacaaaatcaagatggggcgccagcaaaacgcaaatcagggcgccagcaaaaatgcatagcatatttattatcctatagctgatactttagaacaaagcagggtacccacggaactgccagaaaagaagccaccgagcaggagcacagcatccaggagagctcggcgcggcgattatgttgcttgctacccctgacagaaacctcccggtggtattattcccagcccccgtgcgccgtggttctcgtgccctggatgtctaatcaatattacttcaactgagtactagcccttacgaagcggggtggattcacaataagtcgtcgcgagttaatctgaatctgggtggattcacaataagttggcgcgggttagtgtgaatctgggtggactcgtgttaagtcgcgccggcttaatgcgaatctgggtgaactcactttatgttggcgcgagttatcgtagtcgtattattataataaaattgttcagatatgctgacctgaactactagattcctaagctgccataagagcgtcgtgccaacaggggaagtcttttcgtcacaggagggccttcagtggaggcaccaatgtacgtacatgtaaaatacaatatgctttcattcaaattcggcgggtgtaacatgtattatggaatcggcgttgctcggagatagttattatggacctgtgaacgggccaccttttctgcattggttaaagtccagggatcggtccctggctttgtatcaaaatcaaatccattttgcctacgcccgcaaatctgtttgttcatgagtcttcgggagcgccgccaatagatgcacatggacgaggagaacgtgtggacacatccgccgatgactcggaggatccgacggcgacgggagagccgacggcgacgggagagccggcggcagccggactctggatataccaatggctggtcagggagacccaagtatactgagatcaagtcaatcggaacccgggagtaatccgtctgatgagaggcaccaacgagcacaaggagaacaagaaggaaagcaggaggggaagactagagagtagtttgagagacgataacatttaatctcacttcggaatttgccccctcaaccacaagctacaaaccaacaggttaacagccgcaacaagctcaagccctccccgacgaccgacatgacgacgtccagcaagaaggccgaagtcatcctgggaagtgacaattacttccactgggagttcgcgatgcgtatgacgctcgcgaggaaggggctgctggcgcacgtccaagtggtgaaggacccgacggagatgacggaggcctggatgctcaacgacatgaaggcgctcggtctgatcgctcaaggcgtggctgtggaacaccacacgaagattcggtcggcgacgtcggctatccaagcctggaatactctacgcgagttctacaaccggacgacgatgcataatcgggtcacgatgactcgtcggctccacgagttcaagatggaggacgatgcgacgatggcgaagcacctgaacaagttcaacgagctcatcgtgggccttcagacgcttggagagcccctcgatgactcccgacaactcgtcatcctgctgagcagcttgccggcggagtacgagttgatcgcatccatcgtcgagaactggaaggacgtgaccctcatcgaggtgaaggagaagctgctcaagaagtacgagcggcaggagaagaaggagaccacggagcgcgcgttgaaggctacctcgttcggaggtaggggccagaacgggaagttcggcaagggcggcaaggcattcggccgcaagcgcaacggcggacgaaaggtcggtggcttcaagggcaagtgcttcaactgtgaccaagtgggccacatgaagcgggactgcccggaaaaagcaaatgcagacaccgccgaagactcggtgttcgctgtggcggagaatccatcagcgggttggctgatcgatagtggggcgacggctcacatgacgcctcaccgcgataacttgttcgagtacaacgagtcgtcggcggacatgtatgtgacaatcgcggacgggaagaagatccgcgtggctgggaaagggtcggtgcgcctaacgggcatcgacggcaagcgcatcaagatgggggaggtgctccacatccccggattcgaccggcgactactctcggttgggaggttggctgaaggcggcatgagtgtcgagttccagcggaagtcctgcgtcgtctgggacaagacgaaggcgatcgcttcggggaagaaggtcggcaaggcgtacttgctggactgccagcaggacatggtgtattacaccgagtactcgggagtcgacgggaagtgggagctatggcacactcgtatgggacacttgaacggagacgctatggcaaaggcccgcgaggcgacggacgggctcccgacgactcaacagcagacgaagaccctgtgcggaggatgcatgaagggcaagcagacggtcgcacatttcccgtcgcggtcgacgtcggcgacgactcgaccactggaactagttcatacggacgtgatgggtcctatgaagacgaagtccaagggcggagcgaggtatgtgctcacatttgtcgacgactactcgcgacacgtcgtggtgtacttcttgaccaagaagagcgaggtcgtgaccaagttcaagtcgttcatgaagctgtacgagaaccaatggggacagcgcattaaatgcctgcgctcggacaacggcactgagttcgtgaacacgccaatgactgagatctgccgggtgaatgggattatgcatcagaagacggtcgcatatagcccccagcagaacggcgtggcggagcggatgaaccgcacgatcatggagaaggctcgaagcatgctacactacaagggcgtggcttcgatatggtgggcagaggcggtcagcactgctgtctacctgatcaaccggtcgacgaacagcatgcacccgaccaagactccgtacgagttgacgttcaagtcaaagcctcggctggatcatcttcgagtcttcgggtcgatgggttacgctcatgtcgacaagtcgcgacgcaccaagttggagccgaaaagcttcaaatgtatgtttcttgggtacgccgacgactcaaaaggctaccgaatgtacgacttggagtcgaacaaggtgaaggtatccaggtcggtgaagctggacgagcgcgaggtgaacggcatctacgacacgtcgcccagcgagaactcgccgatcattgagttgacggaagatgccgaggatgcggcactgcccgaggagatacaacgacctgccgccgacgagccgatggaatcagtggaagagaccgtcgaggccacggagatgcatgaggtggagacgtcggagccatccatgcaagagctgacaacgtaccgacgactcgcgagaccggtattgaatgatgacatggtcttccatcccgagccagaacggacccggcgcgcccgagaaccggtcctactacttggagatggttccgcagacggtgaggagtcgaaagaagatggtcccgatgactcggacaacgatgatcacttctggccaccgtctccaaagcgacccagggtggacgaagacagcctattggctgaggcggtgctggcctacgccgcagacgtcggcgatgccaatgacgcaccaccacgtatcagcaggtcatgcagagcgacgagtcgtcgtgggtgaaggcaatgaatgcggagctcaaggcacacgcggacaacggatcatggacgctggtccgtcggacaccgagtgctcgaccgatcggttgtcgctgggtgttcgcaaagaaacgcgacgagcacggccgagtcatccggtataaggcccacctggtggcgaaagggtttaagcagaattatggcgtggacttcttcgagacgtactcgcccgtggccaacatgaactcgatccgagtggtgttgtcggttgtggtggccgaggcgtacatcaccgagcagctggatgcggacaccgcctttctcaacagcggactggtggagcgcgtctacatggaggtaccctacagaatcatcaacgcgaagaacatgatgtgtcggctgcagaaggcgatctatggtctgaagcaggcggcaaatgcctggcataagaccatccaccgaggcttcgtgggcatcggatttcggagctgcggcggggaccagtgtgtatacgtcaagggcgagaagggcaggttcgtgtacgtctgcctgtacgtggacgatatgatcatcgcagccaagacgagcagcgagatccaggaagtcaaggtggcgctcaagaatgcgtttaagatgaaggagttgggcgaggccaagttcattctcggtatggagatcgaccatgactcatcggcaaagactctcatgatcaagcagactcgatacattgatgatgtggtgaagcggttcaaccagcaggacgccaaggtggtggtgaacccgtgcgagtcgggcatgaagttgtcgaagactcagtcgccgatgactcagaaggaacgtgaggaaatgcaggcgaagccctaccgagcactcattagctgtttgctgtacattacaacgtgcaccagacctgatgtggcgtacatcgtgacccagttgtcgcgcttcctcgagaaccccgggcagcagcactggaaggctgccatccgcgtgctcaggtacctgaagagcacccgagacatcggcatcgcctacaatgggaacgctaagaaggtcgaggtgacggcgtacaccgacgccgactggggcagaaatctcgacgaccgacgctcggtgtcgggcatcatggatttgattagcggggcgccggtggtcttcaagtcgacgtaccagcgcacggtggcgctcagctcggcggaggccgagtacatggcgctgagcctgtgcacgcaggaggtgctgtggacccgcgccatgctcaaggacatgggtcacgagcaagtgggagctacccaagtatgggaggacaaccagggcgcgatcgccctcgcaagcaacgctgggtacaacgcgaggaccaagcacgtggacatcaagcatcacttcatccgcgaaaatgtgtcccgaggactcatcgtcgtcaactacgtgccgacggaggaccagctcgcggacatgcttaccaaggcgttggggacgaagaggctcaagtacctgatcagcgcaagcggaatcatcgggacggtcgtgcagcgttaacggcgagtgggagtgttcatgagtcttcgggagcgccgccaatagatgcacatggacgaggagaacgtgtggacacatccgccgatgactcggaggatccgacggcgacgggagagccgacggcgacgggagagccggcggcagccggactctggatataccaatggctggtcagggagacccaagtatactgagatcaagtcaatcggaacccgggagtaatccgtctgatgagaggcaccaacgagcacaaggagaacaagaaggaaagcaggaggggaagactagagagtagtttgagagacgataacatttaatctcacttcggaatttgccccctcaaccacaagctacaaaccaacactgtttgctggcgccccaaaaccgcggtttctgtttgctggagcccgtttggttttgctggcgtcccatcttttcgttttcaccctaaaaggtgtttgttggcaccccggtctccaccagatgccgcatccatacggagccgttcggcgggggaaaccaggcacctaagcacacacaactggcttggagagctcgattttccttggtgtcggtcgtattactgtaagtaccggtatgctgacactgcccagctgtttcccgcccaaactaaacgcattcattgtacagtaatttgcctcaatagcgcagtcgtggcatccaataacctgctgaaacgggtagctgtctataccccaaatccacccaatgggaggcccgctagcctctcctatgcaattatcgtaaataatctatacatgtagccattgcgctattgaggcaaattactgtattttaacccctttcgtgagtatcctcagtaaattataaaatacaactcattgatatttccttttaaaagggcgctctaggcgtccttttacaaagttacggacgcttttcggtgtgtctcatgggacatgccatctacggtgatttgcaggatacatagaatgtatgcgtatgacttcgaatttgtaaagacaatagaccttaaaacgagtttgtcagcgctccatcagactcttagcactacacgattttgctatgatacacttgtcgaagactgaggtcgtcccaaccgagattagctactcgctattgaaggtgatcttcgttaaatacttaagcaagtccgaatagcttagctcggggcgtaggattgatctaatcggtagtttggcgctaaggtaaggtgccagttgcgtgcctacaaccagttccgtgcctacttgttttagccaattagcatcttctccttgttaaactctcgtagtctattggtagatttttccagcgtcacatgcaatttccggtcatgagcctcctaggatttgtatagcatacaaaaatgctatcaaaaagaggcaggaaactggcagctcactccaaatcaacaagcttttcaaaacaataacaagaagttctgcaaaatttacacggaccagcgtgaagtacataaattcagcccaatcgcgcagatttagcgggtgcaatcagatttcagaatagacaattcaatgaaaagttatgccacagcaagtccgcaagttcgaaggacggcacgaaactggcagaagaccttatatcggaaatttcacaatagacctgggaaaatgctcaatgacttcgcaaccacccagcatgctgtacttgtcggtcaaactggacacttctggccttacttggcgccgatctcgacatcaccggcagtggcgccgagtccacttgtgtatttaagtagcctggttaactaacaaacgacatggctgcatacagtggagctcgagcgccccgcgaagaagcagtcgacagttgcctggttaattcagctcaatgaagcccaacctgcacggcgtgcgtctgctgctagcctgccgcgagcttcgatgcgaagaagcgtgaccgcaagcgttgcggtcctcatccgcagcatgttccgcatccgtcgcgacatcgaaggagcaggtgcaggagggatgataatgacgcgacagtgttcagcatcttaaataagtgagtctaagtagtctacccgaagagattaagcgactttgtgtgtgccatgcactcgattagaaccgagtatggtcgtaaaatactgagtgacttcggaaatatcaaatctccgttgctttgttgctttccccaccatttcactttgcaacgaaccaaatctctgagtgggcacaaatacaacaacgaatttcggaatagatcacctacacggtttgagttctaatgattacatgatgattactctgcgtaccgattatgatttgttttaaaagaaggttgattactagcttgaacttgtgcaaaagggcacaggatgcgccctttaagagggggtacactctaccgtgttttggaaaatcatctaaagggcgctttctgtatccttttaccgcgacagggttaaaaagtgaattaaaattaaaaaatgaagtttggatcatcaaagactacctaccatatttagttataatgggtgtggtacaaaatgggaatgagtactttcctacctcgatcatcaatcactccgtacaaacttcttcataaagacttcgcccgtcttcaaaatggctccttttttggcaaccccattataactaaaccgggaggtgatatcgacagcgggcttaccactaactgcagcggggagcgaggacaggcgcaacagtactgacaaacgttggtacaatactaacgtacaatgaacgacttccatacatgtagcctgcctgtagctaccgtcttccctcgtactagacgcctaggcgttgtattcgaggttggtccacaatcccaaatcttatctcaccctcgaattgaagctatagcaaaatagaacgcctacccaatgtagcacatgttgtaaatggcatatgatgaccgagatccttgttgccaacaattctgctgtcagttggacgagccagagcctttgtgccgactgccaaccattcgtgcggaagtcggcctctcgtttcgtcgtatcactatacaatcgccctccagcgacacaaaagcccccgctaagaatgtcagctaagaagaagcgtaatagctacagtatcggattcaagcgcagtgttgctggagagtacaagaagggtgtcaacggctttgggtttgccgcccttgccgcaaaacacaagataccctcgtcatcgatagttcggaaatgggttgagcagttgggcgccatgaaagacgttgcgaaggacagacagcgatcaacgcggacgatgcgtcgactgcctggtgcgggtcgcaagcatgaataccagcaactcgaagtgcagcttcatgagtgggtcgatgggcgaaacaaaaagggactgcgggtcaaggacaagtacatccagctacaaatctcaacatcctcgtggctttaaagagcagcaatatcatcttttcaaggcttcaacgggttggctagacaagtttaagacgcgctacaacttggtgtcgaggcgtcagacgactacccgaacactacctgctgatgccaagagtgtgtgcgaggagttcattcagaaagctcagtctctgattgagcagcatcacatcgatccatgcaacataataaacatggaccaggtcccaagatattttgaaacggaacctaattcgacgatcgcaactcgcggaaggggggcagccacaaacgctttacagcaacgttcgcggttactggagacggtaaattcttaaagccccatgtgcttttctcccagctaaaaaaataagccaaaacttggagctatttcgaaggacatcatggttgatgttaacccaacagggatgtggaacgatcagatattgctggagcatgcagaacatgtaatttgcggccgagcggagactcgattttatcggcagtcagtgctttacatcattgattcgtatggatgtcacgtgaatttgttcaatgaacaaaaccttcgtcgtttaacatcttcgtgttattggtaccgccgatcatgaaaatctactccaaccgctcgatgtggctctaaacaggagcgttcaagctttctacaacgaccgattcgacgagtatataggcaaagcgctgatcgatccaactttgcagacaaagcagggtaaccctaaggttcctcactatcgaacggtatctcaatgcgttctggactggattgagatgaaggacgccaccgacatcaaaaaagaatttcgagtttgtggccttgttcaacgacagtcatttgatgtggaagacctccaccctccgcttcgcgagctgttggaggcgagtattgatttggatgaatggcaccgcagatacaaggctctgcttgacgaagaagctgatctagaagaggtttgcattgacccacctgagtggtatctaccggaggagactaaatcaagtcttcatcgttgcctccgtttcagcctcgcaccctccatcgccgactacatcacgctgctgacggagttcatggcaggacttgaagatttgacaggcttacttgaccacgactacattgagtcgatcagaaacggaactgctgaatggggtgagttggagctttttgcagcatccagattgcacaggtgcagcattgaagtgaaaactttgaacgacaactgcaaagtgatttccgagttcacctacactgttcctgaggcaactgggaagatatgccttgctcgactgggccctcagtttgcgttgcacgtagcaggaatgcggatatagcttagaggccactaccaaccttcgggttttttagatttacttgaatacaacgcctaccttttgcatccttcagagtttcgcagtttcacttgaatagaacgcctaggcgtctagtttttttagaacgcctaggcgtctagtccgagggaagacggtagctatctcgggtgtaagtatgcggggagctggcttgagtcttcgctatgagcagtggtcggttgtgtcttgttttactaagtcccaccagtaagttccgcaagaatgctatcggtagacctcagaataggcgtgaaagctaggtagaagtcatgcgaaacccatatacatgatctttatcgtcagctgtaaaatgccttacgatacatgtagaaaaaaagacaaaatagtggcgactgcaggctcatgagaggccaaccaaatgcatgacactctattgataatgcggatccatgatctacccaagcagattgatgatctttcgtaagacgatacttagccccagagagcctaccgtaagacaaagcgtcttacgttttgcaatcaacgcattttggctacatcttggttttagtataccagtggctacattgtattttgtccgtcaaaacgtaagacagtttgtcggacaacaatttgcaccatgcgattggccaaaactttcagaggatagtgtcgttgcgtgcgttcctccgttgagcatgtaggaacccgaggacaaccgctttgccgtttttgaattgctcgtgccacctacagtcgagccgacgaaataaggcgctcacaagcacgaacatgtagtcggtagtgcggccctactgccaactacaatgtacacgcttgtttgagaatggttaagaaataaatgcacccgaaccattagcccagcttgacaaacaaaacgttcagggctttatagtgaattctagttaatgcataaccaaatagagcccctcttcctccggtagtgcggcccacgaaccctgtcgtgtcctctgaggacgcctccgagcgaagcagtgcacgacgagcgcgcacacatgctccgcaccgaggcgttgtcggaggacgcgagggagtagacaatcaatacattatgggatcttaccaaagtcatgaaatgaactgttttgtagtagcaacaaggcagcgtcagccagtcttggtatttgtatttgtatttgtatttgttgcggtttgcttggctaccttactcacggaggcgcacactgctgcagctccacctacgtcggtagtggacaccaccgacctcacccgcggccacgtgtaggtaagctgttggtggtgtcgcaaataaataactacaaaacgacgtgagggcctctaagagtcaaatgagcggcgaaacttctcgggaatacatgaaaaatgccaaagctaaagtaattgatcagcccggctgaaggcgcttaccagttttctcggcctgctactgtagtactaggaaatctaaacgatctaagctcgccgtggtcttttaaatatgtagagggagtttgttggtgtcgcagcgctcagttctatcgaaccgccaatcattactaccactactatgctgcgcccgatattagtcaggatacgaaggtcattgtaagttcggtttacgaggggggagtcaccagaccgcatttggggcagcgttcagaaaggcctcgaaattccccgaactgcctttaacgtcgcattactttcctccagaagtaagaatgagataaatgaaggaacccagcgcccacttttccaggccataaacagctgcagggcggcggcgagctctcgcacttccttggtattggcttccgactttgcggcagaaagctcgattgcgagctccttgtcctcgaactggttcctcaacactttaatggcaaagagattcccagagctgagaacgttgtacctctcaaggtaagccacccaaagaccgaacttggggcttccaagcagatcgtctaggggagttcccaacaaccccagtttcgcgaacaggtcctcctcgttttttttgctttccctttgtatctccacctatcgaactgatagttgaccaatttccgggtaaacaactgcgcgttgagtgacttagatgcatacccggccgcaagcaaactcacaggaatctcgaagttatagtgcctcagcagcgtgccaagcaccttctcacccgggtccgcattcagcattgcgtagctgaaccaagtatcaaataccgggctgacgatttcttcctggtcaagcttgagcagtgtgaacacctcgcgcaccagtctgtccttttccagccggttcatgcgctgagctgcctccaagccgctcgcagtgatttcaaaggttttatctttcttcgccgccgctagcatcttggccagagctccatctccgatgcgagatgacaacgttgatgcgatgaactggtccgcaagctgggggttcttcttgttggcattgatcaccgctctggcccatgtttggaattcagcattggcgagcaggttcgactcgagttggttcactttgtacttggtgaagagcttgtcagcacttgattgttttacggcgtttgtgatttgggttatcaatccggttgtcctcacttcgaggaggttgttggctccttttctcctcagactcctgtccgatcgtagagagcggtcgacccacgtcttcgaggacaccgccgaaacactgccaataagtgccagcaaagcaaaagctgccagcaagacggcgagttgaagacgcaaacgctgcttggacttgtgagccattctgagatggaaagggctttgggtgctgaaggctaaaagcggagtgagagttcgggctctcaaggaacaagaaaagcaaggataacaagcgatgaggaaggcgtaatcgtatcgtgccaacaaataatcaggctcgagacagctaatatattatgagcccgtctcaagacgctttcgttatcgatgtgaacctcacactgtctgtcaacccgcagttactgcatagttttttgttgttggtcagtttatgaatctgaatatcaccgcaaaattacacgtatccagcaactcgcagcgcatcgcgcttctgcttgacgaaattgtacggtctgatggcaacgtatcgttaaaactagagcctttcgtacatgcatcataatttacatgcctaatgggctgaactgttggatccactgaccgctgggataaactgtaatcttttttttcactactgctggtcctcatttcttcttcaactttccctcgggctcagttagcattctcggtgcttctgcactaagaaatagctactgtaaaatgcggagcaagacatttccagtgtagccaggttcaaatcaggctgtcggcagctaccgaacggcgttgtagtcgtccgagctcccgctccgttcttggattgcaatgaatgcgttttgtggatcctaacgattttttttgacttgcgatgtagcgcgtggatgcatgtcttcttggacgaagattgcagctcaactatcagtaattacattcgcacaataaaataaaaagaaaactaggtcgcatgcatgatatcaaaagaaagtcttagcacaacatctaaaagagagatcctgtaaccactcttatgcccagaggtcgtccgtcaaaacggaaggaactcattccccaacttgccccgaagcaattgtacgatgtcgttgagggaaggtgctatacggacggagatcaagagcgagctctgtcgaggtgctactacgacccacgaatatgaactcgacagcgacaactcgccgcactgcaagctggatcttatcgatagcgacaccgctttaatcgtccacgagggcacaaaagcgaccgatgaatcggaaacggacgagaaataccgtcgcaagagggagccaagtcttccagtcaagctgaagttcctcacgggtctgcgaggtttagcctgtttgctggtcgtccaccaccacgcgggctacttactggaggcgacgatcgctccaagcagcgtcgacacgttcttcgtgctctcggcattcctcctgacggcgctcaacgagcccaaagtccgcaatttggtcagtcgcaaggaaggcgctcgcaactggctgattgcactcgcccactactcagtcaagcggttcctgcgcgtgtacccgctgttcgcgttgacagcgttcgctcttacctgcatgccggaagccacgcgcacacgctactacaacctggcccactacaacatcaaacactggagtgtgtgggacattctaacgttcaagaaacgctggtacctcttctggacaacgtccatccagatcacgtactactgcttgatcccattcgtccttgttggagtttgtctgctgggcaagttgaagtggttcgtggtgggggtgctctactgttgggtatactacgaaggctggcacacaaatcgaacgggccacggggaattccgcccccatttgtcgacgtttgtggcgggatcgctcgctgctctggtttactcgaagctggaccgatggatgaaggaacgtcgctttgaaccgctgctgcagcacgtcgttgccgttcgagcgctcgagctggccatggttagcaccatagtcagcgacgtctctcgcggatacttggccactacgttgatcgggcacctgttcccctgccaggacaagatcgtgccctcggtcagcatcccgctctcgactgtgatggtaatcgaagttctcatgccctcggccctctctcgagcgctcgagtggaacgtgctgtgctacacggggaagatcagcttctccatctacttgctgcacccgttcgtcaacttccagccttggattaaggagctcgagcgaatggatcagttcgcagtgagactcgtgctggtgtacgcgctggcctccatctcgtatttcttggtagaacgcaactgcgaacgtcttgcgctcgtcgtaggcaagaaattggcgagaaatgctgggccgacggtaggataagggacaaatactgctacttgtgctaacaaaactcaacgataagaatgcaaccgcgaatgccgaagtgaccgtgacttaaatttacgtccgccacaccaaaggtccgccctttagtggtacagtgtaccgacccgtttgcacacagaagcttttttttccagtctggaatttccccagcgtctggcagagtcagagcctgagctgacgtcatgagcgcgtgggagcagtggggcggcaagaagccggcgagcggcgggctgcagggcgcgcaggaggctttcagcagcctgttgcgcgcctcgccgctgtccacggcgtccacggcgtccacggcgtccgcggacagcgaggcgggcgcgggcttctcgctcaagaaggcgtgggactcggcgcgggacctgaccaagagcgcggtggcggcgcccgcgtcttcttcctcctcttcctctggggcggggaaggacgcggcggacgcgatggagagcgggcagatggacgggcaggtggacgacgcagcggtcgccaagtggccgctctggaggaagaactcgaccagcgaggcggggctgatcccgagcatgagctggtactgtcagtaggccggcgttgagaagaggagtggaggtgtggagagagtactgacttgtgttatgtgttggctaggaacacgcggttcaagtactttgtgggactcgtgatgctgggcatgctgttctttggcatggcgtccatcttcctgccgctggtgagcttggtgctgtgttgctggaaggtggagagggagatgtttaggtgctcatgggtgtgtttctttggtggttggtttagattatgatccggccgtccaagttcgcgctgagcttcacgctgggcagcatttgctgcatgggagcgttcgccatgctcaagggcccggcggcgtacatttcggggctgttgcaggccaacaggctgctgttgacaagtgcctacttcgtgacgctcggtgagttgagatggaagctctgttggtgagagaggaggctttgctaatggactggtgctttttggtgctgatggtagggtgcacgctgtatagctgtttgatcctcggcaactacgtgctcgtggtgctgagctctgtgatgcagctcacgacgctgggatcgtttgcgctgtcgtcttttcctggaggcaactcgagcttgaaaggtgaggctgactcttggtttgacatgtatattcattgtggcggctaactaatgtacactggaccttcgtgtctgcagcgttcggcgcattgttctggaaatcagcacgcggcatgctccaagcgctcgctcgtctctttaggtaaatatatcggacaactcgtgacgacggcgtaggaaccgcagacaaggtgtggcgtggacacccgccgacacaatagcaggcttgacccccattttgtttattagaacgacgtcttcttggctgttgcttcgtgaaggtttcggtcatcccaagcctgttcatcgaagtcaagatcgttagtccattactaatccattaatccggtcgagttgagaagtacccacccacccgttcgctagtcggagcattcagcgctcgcctctcgggcatgtgactgtccatgtagtcaatgcctttggcgaagaagacgcagaggaggccgtagccggcgctgcgtgtcgtggcgtggcagtacacagcagagacagtgagtcggggcgccatcaatgcaacaactcacaaacaaacagacacacacacctctcgcgcgtgctgaggttccggaaggccttgtacatgtctgttgctgtcaggtgtgttggtgtatcaggagcgaatttcaccactggcaggcagggcttggcaccagtggggtgtttgagccacgagacaaatcgagggcaagacgaaatgatgaacggagggtagggacatgtcgtttgtgctttagccttcacatcatctgtgccatcaccgcgaaagcacgcggctgcaaagcaagagcaaggtgtcaagtcaatgacatcttcgctggctacgcgtcgatctgtaccccgagctgcaaccacaccgcgccagccagcatcgtctacatctacacgcagcagcacctttatgtcctccgctcggagacacgcgagcgccagcgctccaggtgaccgacaagggaagacacatggcgtcacatctcaagagcgaaccagcgagcgagcgccttgcagctcgcaaacgctggctatcccgatcttcctgtggcgctttgtgatgactggtgtcgctctattggcgcctccgcttggcatctgcctggttgtccaggtcgctccacgcctgatggacaaattgatattggcacatgggggtcagcttgatttatcttaccggcaggcaggcaacttccagccgacacaacgcactagagcgtcgcccttgaccttggtcgggtccggttccggcatgtggtcgtccatgtacttgatgccgagccccagcgccacgcacagcacggcgtatccggcgctaaataaagaaagtcaattgagttgtgcaggcccaagtcagaacgccagcaccgcactgatgaggcggtgagcaaccgcgtcaaatgagggggattggacggacctctgccgggccgagaggtgcttgaacggcaggaacatcggcggtcgaagctgcgtgaggagacttgcgttgtgataatggtcgcaatagcaagaatcgaacgttttgcggctgggttcgtaatttaacgcgtgatctcattggctgacggggctttttaaattgatttttagaaggttgcattcgtaatttatggaagatatgacttcataatcgaccactttgcggcactcaacgtaagcctgcgaccggatttatgcatctgctgcaagcgcccaaagatgtggggtctcggactcgacagcccccgcttctggcgacgatggaacgtccctctcgtccgtatctccttacaaattcaagtgaggcggcccccgcttccggcaatcagcgacacgctccgacttctttttttcccggcccccgacccgtttgcgcacttgaatctcaaatccgccaaagtgcaacgcgttacagccgcccggcacgactgacggagacggcactgcctgcctgccctgcatcatgaatgatgtcgccggggcgcgaggcgcaattgccaacttgcctccatgtggccgaacgctcggctcaccgttgaccccgtgacgaactgggcgccggcagtggcagcgccgacacctgccggcgaagtgccgacagccaccccgccggcatacgccggcagcagccgcagcaccagcccaagcagcggcgaggacacgccgactgccggccagacgccggtgcgcacgctgccggccagcagcaacagctccaacgccagctcgcagtccaccatcaactccatgtggctcaactggaagagccccacggccgtgctggacctgagcgcggaggccgagagcggctcggcgctcgagatgcggcgccagaagaaccgcgagtccatgcgccgctcgcgccagcggcagcgcgaccagctgcagctgctgcgcgacgccgtggccgagctggagcagcagtacaactcgctgcgcctgcgcgcggacgacgccgaaaaggccgacaacagcagcagcaacaacaacaacagcgcggccaacaccaagtacgcgcaggccgtggagctgtccaagcagctcggcgccgagaacctgtacctcaaggcgtccatccagtaccaggcgtcctggaagctcgagctgcgccgcgtcatggagacgaccgtggcgctggacgagttcacggcctcggcctccgcgccgccctctccgttccccttcaagctcgagttcatgaacgagcaggaggccgagtcggtcttcggcttccaccccttgacggagcgcgacgtgaaggatgtcatcctgcagaacacgcgctcggtgagacgcgtgcagcaccagctgttcggcggcaataacaacagcccaagcaccggcaccaccgacaacaacgacaatgacgacgacagcgacagcgccgacgagatggccgacaacgtgctgggcggccccatcgaccactcggagctcttcggctgggacctgcggcggcgcgtgcgcggcagcgacatggagttcgtcttcaccaagcgcttcaaacagctgtcggtctcggagatcatgcagaagtcgtgggtcaacgagatgcagctcaagggcgcgcagatggtcaagtacgacgtccagcggctcgagatgctgcaggagatcaacaccaacgcctacgtgctgggccgcgacgtgcgcagccccgacgagacgcccgtgttccgcaccacgctgctgcgctaccgcatggagacgaccggcgaggaggtcggactggactcgagtctgcgcgcgtcgggcttcgtcatcggtacgcagagtctcaacccggccgacacgtccggtgccaagctgctgccggagcgcgcgggcatcgagccgtccgcgcggctcgtgtgggccgagctggcccacgccatcgagctgctgcaggtgtcggaccgcgtcacgggcgagcaccagtacgtgcaggtgcggtggtccggcaagaacaactacggcacgcccttcgacgcgcaccgcaacgcggccgacatggtcacgacgctcatgcgctgggagctcggcaccatcgcgccggccgcgcagctcatcccgaactccgacgacgacgatgatgacagcgccgaatccgcgccgtcaacgccgataccggcaccgacaccgggaccggcgtcgctgtgagtggatcttgagataatttaacacattcgtaggcgtaagtggaagtcgctcttttggataatgaaagtgaagttgctgtggtcgagagccgagagccgagagccaagagagccaagagctcgtaagactgagttgcagggcttcaaccacatcgctttgccgacggaatggcccgcgccaccatcagtggtgcgtgttgctcgaagctctgtgtttgacgccgtacagctcggaccgaagccacgttcgtaatcaccggatcgcgttctttcgtgcaattgagccccaggagcaaccaccaccaaaagctcacacgctccgagctctgctgcatcgagtgtttggcgtggtggcaggccaccatgtccatgccaggaatcccgacaccatggcatggggaggaaggaggaagcgtccagcgagacgcgcgacccggcggagggatcacgtcggacaagttcaactcggacctcggcatcaatccagtggacctgcggtcacgaagcaccacgcagttgccgccgcgacgacgtcgcgaccgcgctgacgcatgttgcagttcttgacgtcggcgcgtcgataaactgaagcgcggggcaacgctgcttggcgagcttcctgcagagcttcagccccacgatcaccgcgattatggggccgcattgagtccccacctcggcagctacatgtcgccagccagatcagagtatccgattccatcgggtgcgttatcctctagagtcttgagactctggaggataagcgttctggaggactttccgcccgttccgggcgtattgcagccaccactgtcaatatctcggggtggcgatcaatcgatcgatttgccacgacacgcgcgcactcgccgtgaagcgagaggtggcgaactccccggaagcgtctgcctcggacgactggcagtcggacacggacgcgctgctcgactgtctcccctgggacgagctgcgggacctctctccgccctgcacgccgcgctcgtgcgcccctacagacttctcgccatcaatggacgcgatccgaggcgccagtccgctcagcagcccagccgttcgcgtccatacgctgcggtcggggaccggcagcggcctgagcccaatccgcggcgaggacgaggaaccactgcgacatctgacgggaggcggagctaccagtctcagcctccacattgccatgaacagctcgcagatcgacgcgatgtgggcgtccgtgcactccgcgggcttcacgtccgctgccatgcccatgatggacacgcccatggcgccacccccacttacgtggactaatagcgatattagtcagcaggtgatccagtgcgaccagctcccgaacgccagcgccatggaccgacgccgacagaagaaccgcgagtgcatgcgccgcgcgagacagcgccagcgggacgagctcaacagtatgaaggccaccgtcgccaggctcgagaagctgtacgcggagctgagcttgcagtcgacctcagggagcaggacgaacgtgcaggagggtgcagtggtgtctcgagtagccactgactatgcgcaagcggtggagctgtcgagacgccttggcgccgagaacctgtacctcaaggcggagatccagcagcaggcggcgtggaagctcaacctctcgcgcatcctgcagtcgcgcatggaggtggacggccctcgttgggcgcggcagttccagcagccgtcgctgggcggagaggaggttctccgcatgagacttgatgaacgcgaccagtttgaggcggcggaggagttcggcttccacccgctgacggacttggggctgacgcaggttttactggagaacagccgcaccatgtcgcgcgtgcacagtcgcctgttgatcccgtcgtcgctcgatacggacgacggcgcccgtacgagaaggatcacgacgttcggctgggacatggtgcagcgcgtgcacgacaacatcatggagtgcgtcctcaccaagcgattccacggcttgaacgtggcgcagctcatgcagaagacgtgggcgaacgacatgaggctgggcgagttcaagaaggtgaagggcgagacgtctcgactcgaagtgctgcagacggtgaaccccaacgcctacgtattggtgcgagacgtcacgtctcccactgaagacatctcgacgttccgctctgtgttcgtgcgcttcctcattgaaacgagcaagaagatcccggcgtcggatgccgtcaaggctgcgcccaccggtatcgacgctagcgctccgtccatgccgccgccgtatactgaatcggactcggagtgtgaagatatgatactggaagctacgggctacgtgctgagcacgcagagcttcgataccgactactcgaggaacccgagacaggaagacgtccgcaacaaggtggcgtgggctcacttgtcgctgtcgattgagtttttgaacgtggtgaaccctgtcacgggggaggagtaccagcagttgcgctggaccggacgcaccaactactgcgggccggagcacgcgcaacgcaatgcgagcgacatgatgcagggaatgttgcgctgggagctgctggtcatctcccccgccgtcaacctcgtgtcgctgtcgttagagtgaagtggtcgtcgtcgagttttgctttgatagtcgagaaaaagtcagaagacacctgtgctattctccttcaaagggctggggggtcagcggatttatccgagctcatttgctacggttccagccccaccagtgaaggagacacgtgcccgagagagaagctgtgccaatgagacgggaacccaaggctccggtgggctcaactgcagccgacgattgctgtttggacatctccgaagttctcgacaccttcgactggggcgagttgacgccgccgcagacgccgagatcccaggttgcagccccgttcgatccccgcgtgagaccatttgctacgattagtggagagagcccgttcgagcaggctggccaggtgaaccatttggatctctgcagtgatgaagagcagaagtgcttgatgtcttcagctggtgaaggcggcagcttcggccttgcagactgggcaactacccaacctgatcaaaagcccaaggcacaagattggatcactccaccatcaccaagtggtgcggcaggcaaagcatccaaagcctccgacggggagctaagtgttgttgaggtgcggcgtcagaagaatcgcgaatggatgcgaaaatctcgtcagaagcagcgtgaagcattgaatacaatgaagttgacggttgcgaggttggagaagcagtacacaaagttgagtttaagtgcagcacggaccatgaacaggtcaattaatgacgctctcgtcgctcgaagcagaattgcatctgactacgcagacgctgtggggttgacgagacggctcggagctgagaatttgtacctcaagtcggagatacagcagcaagcggcgtggaagcttcatctctctcgcgctctgcagtcgtgcatggaaatggagggccctcactgggctcagcagttccagcaaccagctctagggggcgaggaggtacttcacatgcgtcttgacttgcgagatcaactcgacgcagcggaacagttcggcttccacccactgaccgacctcagactgactcaacttatcttggagaacagccgaagtgtggccggagatcagaatcgtttactggtgccttcatctcttgatactagtggtggtgctcgtcccgaacacgtacgtgatggtgagagatgccaagtctccaaccaatgacatctccatctttcgctctgtgttcgtacgcttcctcattgaaacgagcaagaagatcccgtcgtcgaaagtgaagcccagttttgacgcgagtactccttccacaccgctgcactataactccgagtccggagaaatgatgctggaggctacgggctacgttctggggacgcagagtactactcgaggaacccgagcgaggaggacatccgcaaaaaagtggcgtgggcgcacttgtcgctgtcgattgggtttttgaacgtggtgaaccctgtcaggggggaggggtaccagcaagtgcgctggagtgggctaacagatcattgtggaccagaacacgctgaacggaacatgagcgacatgatgcaggaattgttgcattgggagttgttggtaattgcacccgctataaagctcgtgccaatacgattcgagtagtacatgtacattgcagtgtaatggttggatttcgagcgatacatttcgcctcatactaccaatgaaaacaaagcgagctccatgccagcgagggagcgtccttcatttcgagtacatttcatggactttcgagtacaatgcgctcggacttccgagtctatatacttcatttgaactgttatgtgcgacttcaaacaggccgtctctttgtcgtaaatttaccagggccaactccctacgtaagcaactcaaatgtatgcttgggtattcctctacggtagcaagaagacgttgtattaataagagcactcaaccctgaacaacgaactgccacggggagtatcccaattcctgtgatgcatgtgcttgaattgtattgtcgagctgacaacgccgactgagggacagaatatgtaataaaaccaagtgatacggtttcgtggcctagcaacagcgcgtatagcgatgggtagttggcgctcaaaactaccatcttgtacaccttttcaacttcaaaactgcaaattgtaagttcaaaactagaccagaccagcttcgtacttttatacacagctcattggttggcacgcagcatagctagccaacaggcaaattgtactctataatcgtatacgatgatagatttcattcagtttgtaatatacatctatagagtattgttgttttgatcttaccttttgctgttttgaacttacaatttgcagttatgaagttgaaaaggtgtagaccaatccttgctttcgtacgcattatttttcaccaaataaacgctaaataccacgctgtatgcatggacgctgggggtaaagttatgatgtacccaagctaattcttcgccgctggaaaggagaaatactattgcctcattacatattgccagaaaaattgatcatcctgccttgtcaccagccggttattggattaatccccctgtcacccacactattacgcgttgacctcactcctcgcttctagagaatttaatcggatgacattcggatatcggattggcatttctgtttcatccggttcaaccggtttgaaaatcgaataaattcggttatattcgaatgcattcggattgtttgacttattacattatggagtatccttctatatacgaataaatcagcaatcggctaccacggggtaataaatgatacacattttttgagtggtcatgattggataaaatcagaatgtgtacaaagaaatgtcccaaaccaaattcggattgcatccggatgaacccggatcagaatccggatttttattgaccggttgcattcggatttcattcgaatgcaaccggttgaaaccgaattcggccatccttttacattctctactcgcttcagggccaatcacgaatgtacgagacacacttgctggtactgtatttacagtgttacttgaaagtgaattgataactcgttcaatattcccacaccgtcgaaagctctcagttctcactttgctttctgccgcaaccatcgtccaagtgctcagaatgccaaacaagtccaagcagtccatgcgtctcggacctgccatcttcctggctaccttcactctattggtattcgctagtggggtatcgggaactgtccaccctccaaccttgcgagcaggtcgagacgacaatacacttgaagagaggacgacgggtcttatcagcgaactgaagcaagtggcgaggcaagccaaagccgacaagctcttcaccgagtttaaagtccacaaagtcgactcgaacctgattgcgagcgcggagttccaagcgtgggccggtgcggtactcaaagccaacaagaatgttggtttttagcttgtggttgagggggcaaattccgaagtgagattaaatgttatcgtctctcaaactactctctagtcttcccctcctgctttccttcttgttctccttgtgctcgttggtgcttctcatcagacggattactcccgggttccgattgacttgatctcagtatacttgtgtctccctgaccagccattggtatatccagagcccggctgccgccggctctcccgtcgccgtcggctctcccgtcgccgtcggatcctccgagtcatcggcggatgtgtccacacgttctcctcgtccatgtgcatctattggcggcgctcccgaagactcatgaacactcccactcgccgttaacgctgcacgaccgtcccgatgattccgcttgcgctgatcaggtacttgagcctcttcgtccccaacgccttggtaagcatgtccgcgagctggtcctccgtcggcacgtagttgacgacgatgagtcctcgggacacattttcgcggatgaagtgatgcttgatgtccacgtgcttggtcctcgcgttgtacccagcgttgcttgcgagggcgatcgcgccctggttgtcctcccatacttgggtagctcccacttgctcgtgacccatgtccttgagcatggcgcgggtccacagcacctcctgcgtgcacaggctcagcgccatgtactcggcctccgccgagctgagcgccaccgtgcgctggtacgtcgacttgaagaccaccggcgccccgctaatcatcaccatgatgcccgacaccgagcgtcggtcgtcgagatttctgccccagtcggcgtcggtgtacgccgtcacctcgaccttcttagcgttcccattgtaggcgatgccgatgtctcgggtgctcttcaggtacctgagcacgcggatggcagccttccagtgctgctgcccggggttctcgaggaagcgcgacaactgggtcacgatgtacgccacatcaggtctggtgcacgttgtaatgtacagcaaacagccaatgagtgctcggtagggcttcgcctgcatttcctcacgttccttctgagtcatcggcgactgagtcttcgacaacttcatgcccgactcgcacgggttcaccaccaccttggcgtcctgctggttgaaccgcttcaccacatcatcaatgtatcgagtctgcttgatcatgagagtcttcgccgatgagtcatggtcgatctccataccgagaatgaacttggcctcgcccaactccttcatcttaaacgcattcttgagcgccaccttgacttcctggatctcgctgctcgtcttggctgcgatgatcatatcgtccacgtacaggcagacgtacacgaacctgcccttctcgcccttgacgtatacacactggtccccgccgcagctccgaaatccgatgcccacgaagcctcggtggatggtcttatgccaggcatttgccgcctgcttcagaccatagatcgccttctgcagccgacacatcatgttcttcgcgttgatgattctgtagggtacctccatgtagacgcgctccaccagtccgctgttgagaaaggcggtgtccgcatccagctgctcggtgatgtacgcctcggccaccacaaccgacaacaccactcggatcgagttcatgttggccacgggcgagtacgtctcgaagaagtccacgccatacttctgcttaaaccctttcgccaccaggtgggccttataccggatgactcggccgtgctcgtcgcgtttctttgtgcacacccagcgaccacagatcggtcgagcactcggtgtccgacggaccagcgtccatgatccgttgtccgcgtgtgccttgagctccgcattcattgccttcacccactccgacgactcgtcgctctgcatgacctgctgatacgtggtgggtgcgtcattggcatcgccgacgtctgcggcgtaggctagcaccgcctcagccaataggctgtcttcgtccaccttgggtcgctttggagacggtggcctgaagtgatcatcgttgtccgagtcatcgggaccatcttctttcgactcctcaccgtctgcggaaccatctccaagtagtaggaccggttctcgggcgcgccgggtccgttctggctcagggtggaagaccatgtcatcattcaataccggtctcgcgagtcgtcggtacgttgtcagctcttgcatggatggctccgacgtctccacctcatgcatctccgtggcctcgacggtctcttccactgattccatcggctcgtcggcggcaggtcgttgtatctcctcgggcagtgccgcatcctcggcatcttccgtcaactcaatgatcggcgagttctcgctgggcgacgtgtcgtagatgccgttcacctcgcgctcgtccagcttcaccgacctggataccttcaccttgttcgactccaagtcgtacattcggtagccttttgagtcgtcggcgtacccaagaaacatacatttgaagcttttcggctccaacttggtgcgtcgcgacttgtcgacatgagtgtaacccatcgacccggagactcgaagatgatccagccgaggctttgacttgaacgtcaactcgtacggagtcttggtcgggtgcatgctgttcgtcgaccggttgatcaggtagacagcagtgctgaccgcctctgcccaccatatcgaagccacgccgttctgctgggggctatatgggaccgtcttctgatgcataatcccattcacccggcagatctcagtcattggcgtgttcacgaactcagtgccgttgtccgagcgcaggcatttaatgcgctgtccccattggttctcgtacagcttcatgaacgacttgaacttggtcacgacctcgctcttcttggtcaagaagtacaccacgacgtgtcgcgagtagtcgtcgacaaatgtgagcacatacctcgctccgcccttggacttcgtcttcataggacccatcacgtccgtatgaactagttccagtggtcgagtcgtcgccgacgtcgaccgcgacgggaaatgtgcgaccgtctgcttgcccttcatgcatcctccgcacagggtcttcgtctgctgttgagtcgtcgggagcccgtccgtcgcctcgcgggtctttgccatagcgtctccgttcaagtgtcccatacgagtgtgccatagctcccacttcccgtcgactcccgagtactcggtgtaatacaccatgtcctgctggcagtccagcaagtacgccttgccgaccttcttccccgaagcgatcgccttcgtcttgtcccagacgacgcaggacttccgctggaactcgacactcatgccgccttcagccaacctcccaaccgagagtagtcgccggtcgaatccggggatgtggagcacctcccccatcttgatgcgcttgccgtcgatgcccgttaggcgcaccgaccctttcccagccacgcggatcttcttcccgtccgcgattgtcacatacatgtccgccgacgactcgttgtactcgaacaagttatcgcggtgaggcgtcatgtgagccgtcgccccactatcgatcagccaacccgctgatggattctccgccacagcgaacaccgagtcttcggcggtgtctgcatttgctttttccgggcagtcccgcttcatgtggcccacttggtcacagttgaagcacttgcccttgaagccaccgacctttcgtccgccgttgcgcttgcggccgaatgccttgccgcccttgccgaacttcccgttctggcccctacctccgaacgaggtagccttcaacgcgcgctccgtggtctccttcttctcctgccgctcgtacttcttgagcagcttctccttcacctcgatgagggtcacgtccttccagttctcgacgatggatgcgatcaactcgtactccgccggcaagctgctcagcaggatgacgagttgtcgggagtcatcgaggggctctccaagcgtctgaaggcccacgatgagctcgttgaacttgttcaggtgcttcgccatcgtcgcatcgtcctccatcttgaactcgtggagccgacgagtcatcgtgacccgattatgcatcgtcgtccggttgtagaactcgcgtagagtattccaggcttggatagccgacgtcgccgaccgaatcttcgtgtggtgttccacagccacgccttgagcgatcagaccgagcgccttcatgtcgttgctcatccaggcctccgtcatctccgtcgggtccttcaccacttggacgtgcgccagcagccccttccccgcgagcgtcatacacatcgcgaactcccagtggaagtaattgtcacttcccaggatgacttcggccttcttgctggacgtcgtcatgtcggtcgtcggggagggcttgagcttgttgcggctgttaacctgttgatttttagcttgtggttgaggggcaaattccgaagtgagattaaatgttatcgtctctcaaactactctctagtcttcccctcctgctttccttcttgttctccttgtgctcgttggtgcctctcatcagacggattactcccgggttccgattgacttgatctcagtatacttgggtctccctgaccagccattggtatatccagagcccggctgccgccggctctcccgtcgctgtcggatcctccgagtcatcggcggatgtgtccacacgttctcctcgtccatgtgcatctattggcggcgctcccgaagactcattaacaaagaagaggcctgaacgagctgacatggtcatggcaacaacgcaagcagctcacgtgggagacggcgtcctggccaaaatgctagcagctgcgaaagaagtcgaaggcttggcagccactgctagtaacttggagaaagctcagctcgccaactggttggaaaagcacaagacggtggaagacgtgttcaagctcctgaagcttggtgatgaagcgggcaagctcttcagcagccctgtgtttagcacttggatcagctacgcagagacgttgagccagagttcggaagagtcgatggcctcgatggttcgagtgctgaggctgcaccgtaaagacgaaactcttatgaatctggtcgctgctggtaaaacttcgtcgccgcccttcgatgtgaaaaatctctccggaaacctggagaagatgctgatggaaaagtggatgtccagtgtacaaagtgaggcccgagtgtttgagctgatggggctgaagagtactcccgttggcgaccttctcgagagtccgatgtttagcatgtgtgtaggacaactacagcgttctggacctcgctatggcactcgcttcggcaaaatcggccaacaattcctggcaagtgcagagcttcgcccgttatctgcagttgcaccagtttgcagaatggaaacgtggggtcctgatcgtatcaaatttatggctagtttccgattgagcgagcccaaacttgagcaggttttgggcgactacaccaccttctacaagataacgacgatcatgactcgtcgctgagcgaggtgtcttggaaactttaacttgccgcgacttagattgctctactgtgcgggagtttttctccttttactttagtgcttcgagtaaatcagaacaaggcaatgcttgatcacgccatgccagcttgtattttattgccttcgccaagacgcgaacaaagcaagcggggaaggcgaagccatcgacgagctgcactccacaagacgactatagaaagacaagaagggttcctcttaacgctcttaaatacagtgcaaggttgcgctacggagacgagcacgagcggcctcggactccgtcaagataatggacgatctgcttgtggcgttttcgaggaacttggggggtaatgtaggtaggcctgttgtaaagtaagtacgcctttccgtcgactaggacagcaggcgcacgcggcccattgagactctgcgcgcgctggcgccacctgttgagcttgaggtcgagttccgcatggccgtcgagatggcgtccgagcgcggcagcgagttggacgcaatgtatgactcggccagtgttgtctcctcgtcgcagctgaaggcgaagcctgtgttgcgccgacttgttgtgggccggaacatcttggccggcacgcgctcccacgtcgcgtcctcggagatggactcgctgaatacactggccgagtagctctcggcgactccagagctgacggaggcggaggccgcggaagccgaggagctcttcttcggctgctcgtacagcgtcgcagcggtgaagctctgcgggtgttgggccttgaggatctcggcgtctgagtgtccgaagtcgctcaggtacccggtggtgtggacgtcgtccagggacatggatagcgtctgctcctccgagtggttgatggtcaggcgtcgctggtacttgcgctgcgccgtgccacccatagattcctgcagtagctgggccaggtccgggtggaacgtccgctggtacaggttgtaggcaatgtgacgccccaacgccagcgagcagcccatggccaggacgaggaagtagccccacgtccaggcggtgggggcgaacgctccgaactcgtcgtagccgaccttgtacgtggcaaagtacggcgtctcggtgccgatagcggcgaacatgaaccacgacatgacgctgccgaaccacagagagaacgacagcaccgtccaccggtcagcgatcatccagatcttgatgttcacgatcaacaccgtcagcgagaacgccaccatgccgaactccacgcgcgactcgctgcccgccgccttctccgacgcgttgaagccgtacgacatgaccacgaagatgatcatggactcgtagaaggctgcggcgatccagcggccgaatgtgtacatgttgaagtagaatcgctccggtccgcggcggtacaagtccgggtactcgaggctgaacggagccgggaggtccttgtccagcacgcccaccaccacaatcggcaggcccgtgaacgccacgttgtacagctgcacaccgatctcccagtacattttggagccagaggcgcccgagaggtagccgtaccagtactgcgccagcaccagcgtgatgttcttgtagaacatgtagagcaccagcttggagatacgaatgtagttccagcgtccgtgaaccagcagcagccgctccaagaagcggaactgcgcgatggcgtagtcactcgagttcacagcctgcataccttcctgtccagatataccgacaccaacatgagcagcctggatcatagcgacgtcgttggcgccgtcaccaatagcgagagtgcgcacagtcgtgatgttgtccctcacaagcttcaccatctcggccttctgggcaggagacacgcggttgcagatcacagcacggcacagcttggcaactgacagcaagtggggtgcagttccaggtcgtagcgccatctcgagcgcctcaccatcgataatcaacgagatctcacgttcaccacctccagccatccctcccttcgcgttctccatgaactcccgagctgcagcgttcaacttggcgcggatcgcggcctcgtccggacacgtagtcgcgttcacgacaacctgctggatggagttgtccagcagcgagcacgcgtacgaaatgttgatcgcagtctcctccttgtcgcccgtgagcatccagaccttgatacctgcgcgcgtcaagttagctaggcactgcggcacgccatcttgaagcttgtcctcaatagccgttgctccgataagctctagtccctcctcgatctcctccatcaggtcatcgatcgcgttcggtttgccgtctttgcgtcggtcgatctccgccacgttgccctgcgcgtcgtcgaagcgcatcttccactgctggaaccagcgctcgtccagcttcttcatggccagcgccagcgtccgcaagccgtcgtccgcgtacttctccatgtggtcgcgcgtgatgttcttgagcttcagcatggccgggtcgtccttcaggcgctggtagatcatcatgtcggctcccttcgtgtacagcagcagctcaccgctgggcttgcggaccacaacggacatacgcttcctcgtactgttgaactcgagcacgtccaggatctcgtacgacacgcgctggcccaagacctccacagtcgccgttcccacgctacggctctcgaacttgaagcctgcgaacgctgcgcccgccaccagagcctgctcatcaggagacgaagccgacagacgcacttcgccagactccagcttctcggggatcaccgtgtggcacacagccaagtgctcaaagaactgcaagatcttctccttctgctcctccccagcgctgcccttcataccgtcaaacagcgccttgtccacaaagttgacgaacgggatcctcttgatgctcgggtccagcttgggctcgggcggaatgggcttcccagcgcgcacgagcgctgcgcgtccgatctccgtgatgccggagccgtaggacgtgccgttgatcgagcacttgcggaactccatgatgttgcacgtgagcgtgccggtcttgtcgctgaagacgtacgagatctggcccagctcttcgttcagctccatggtgcgcacaatggcgggcgtgtccgtctcggcgtgatacatctcgaggtcccacgacatgaagcgcgactgcaggaacttgacactcgtcatggacacgtagagcgagatggggatcacctggtagagcagcaggaagtagtagaacagcatctggatgaacgccacgaagcgcgtgcggttccgctcggcgtccgtgagctggatgtaccacgtgttgcgcacgatgtcgtattgccaggtaatatagcacgtcgcggccaccgcgcaggccacgaagagccccatgcacaggatcacgatcatgcggttgatgtgcagcatgaggtcgctccacttggagggcgcggcgctggcgctctgcatgatcttggtgtcgttaccggtattcagcacgaggccgaagacccagtccgtgttgcgcaggttgcagccgcgcagcagcacgttcttgaccgagagcggcatgacctcgacgccgcagccgtcgcccaccgtcacctccaccttgccggcgaacttgttgatgtgcgggttgggctgctcgcacttgaccacgccgcgcagcagcgccagctcggccgcgttggccagcgagctcatggtggcggccacggcctggcgcagcttgaggttcgtctctccgtccagactcttggtctcgacgtagcagatgccgctgggcggctcccccacgggctccgacactgcgagcaccagcacgtcggccgggatcacctctcggttgcggatctgcaggaaatcgccgaccttaatgtccgcccacttgcggtccacgacgtgtccgtcctggatgacgtggcacgtggccgagttggcctcgttgtccgacttgtggcgtctcaggtcctccatgacggcgaacacggcgtcgatcgagatgacgaagaagagcacgggcgcgttcgtcgggtagccgtacgtgttgctgatgctcgggatgctctgcagcacgcagaccatgaggaagaagaagttggccaccttgctgaagctctccttgacgaacttgggcaggaacgtcacgagcgagtacttggacgtcaccacgacgttcgagcacttgtcgaacaccgcgttgcccggcgcgtagttgaagtagacctctctcagcggctcattgtctgcgtgtcctcctgctgctgctgccgctgctgtggttgctcctgtgttgaccgtgttaaccgccccagcgggcgtgtgctgcgccgcgtagtccacgagctcgtcctcgtccgggatctgctcgtggtcccttcggctcttgcgtcgcacctggcgcggcgactgcagcacgggcgcggggctgcccagcgtgttgtaaccgctcgtgctcgagcccagcgcgagctcgccggcgtccgacgaggacgaggcggacgagacgcccgcgggcgccacgctcgcgcacagcgccacctcgtcctcgacccgcgagccgcggaagatgcgcgacgtgctgcgcttggccgccattgcgcgtcttccctgcctgcctgtagctaagctatacctgtcactatgcaggggcgagacggaggtgctgctggcgtgggccggtctaattgtgaggcggactggcagcaggctggcagggcagggaccagactgcgggggagaggcccagcccaacggcgcaaaatagacttgcactgaatggccctagccctgaccgttgaaattgttccacttatgtcacgcccggtggagttttggccaatgggaggcgcgcgagacgacataaaaagcttgaagtgtgggggaaacgagccagttggcgacttgcacgccacgaaaggcaggccccgcactgcggacagagcccgggcgcccatttcaaggcgctgttgttgtgggctcgaagctgctgctgctgttgctgtcgttgctggctgctgtttgcagccgcgcattgctcgtggagacgaccgctaatcaattcgacagtgcgctttgtggctgctggtgtgaggttgtcgtcgtgaccgcagggatccgctgggcatgggtatgggtatggtatgttgttcagtcctgtagccacctcctcccaccattactgtacatggaaggaatggagtcgaaggtttgctgttaaactcgcagtcgataggcgcctggttgagctggggtcccagcgtttcgccgtgtcgggacgaggtcacatcagttgatttgtgatgtgtagaacacaggatagtgtgggccacacggttggtccgacctttgggtggtaccctgtaccattctggcgttgaaggtggcgtttcaacctttgggctctcgcagtagcacgccggcccaaacgatcttgacagcgagcttcgaggggtacggtgatcatgccacgttcaaagcacgcatgttgatttgtcactgcgtggggatcacgggcttctaaggatccgatgccatgcagctgggcccccagatgatgaaacgtgcgctggtcgatcaaaatccattgggggcagatgcagtcggtaaaattgcttgttttacactttgtcatgcgatccgatggttttcacgaaccgagctgcggcgttccgttctggtctccccggcgctgttgactcacacaaacgtctgtgaggcaaacggacccttggcctggtaagttggttgctttgagctaacttaccggtgcatgtagtgcactgttcgagttgaagatgttccctgaaatttatttcagagttaaggaatcactgtatgaataatccctttccccctactgaccaacttgattcatcgacatcttgcagcatgggaggtttttcatataaatggcaagtcaaactacagtgcactggagtgattgaagaggcataccccataggtgaatgttacctgtggcgacaggttgtgtcgagcgccaatattcaagcgacctagcgcggacctggatatggggcgcgttgttggccattccgtacccaagaactagacgttcttgggtacggaatggtctactgtacatgtagacacggagcataacatcattgagagacacctctattactagtgcaagtatatagaagtgaagaatgaggcacctacgaaaattaagcgtgccactaagccttgttcagggcaagttccgtgggtagatcaaccataacgtgcaaccaaagcaaaacataatatttccttctgagctttcaccattcatcagagaactgcagtttctggagctattttggtccaaaatttttggacttggagctacataaaatccggattatctcagataatccggaaatatattacggataaaataccggcggatacccaatacttaactccgggtacccctgtaactccaaggagtctatttttggagcaacgccattttagctccgaaagttgaaatacttcagaaactacagttctctaataataatttacttttaaaagtctcaactttcatagcttcctcgggccggaggcacgccactgctgttgacttgaggcccagtatttttggtcggctagatttcggattgtgtagtgttcgcacaaacatcaagtgtacaactttttttaactagcacttgcaagctcttgggtagtgtatagtgaatctggctaacatgtacaagtatgcgtttcttaatcgttcatcttgaagctctttttatgccagaagttatcctcctttggaatatggattcgacaaccaataacagttcgcttaaagagccatgagcttaaacgctacatgtagtgatagaacagcaaaatacaaacgcgtttgcaaacaacatttacagcgactcagtgtattgtgaaagtcactataatgtttgcggaatacgctgggcttgaggaatatttgttggttctactgtagattcgaggagataattgcaaggtgtttatattgggttattctcagataacttcggtattgccactggtatactgtacgtcttggcagcttggcccaaagcagcttgccaacgtgacaaaccgtgaagtatacgaatcgatatacagtactgaacgctgcccatgagtagcggttgatctacgttttgatcaggtgattcttgttgtagtccatcagacgatacttgttgtagtccttcaggtacgacttccggaacttccagttcgagtcagtctttttcctcacattcatcaactttgccacattgatcggctgcttctcagcaaagatgaactgcttgagcctctcagtctctaacttggcccccgtcgacgggttcttcttcacggcttgaatcgctgtccaaaggtcttggtccttgtaagctgtggtcaagatcgtacgccgaatattctcgccggggaaggttttgttgaagccatccatgaacttcatccagtataagaacattgggtccaggaagagctgttcagttcccacctgaccgagctttagcattttgaaagcgtggtcggggccgttggtggcagccatcaagctcttgaacagcacagcttccatccgcattgcagcagcggcagagcttgggaccttttccgctgcaagaatcgtcttggctacgtcgaaatcgtcttagtgagcgctcataatccagcccgttgtcattttcgagcccaaattcttcgcgtgttatgcgtctataaacttggtaaaggtcgtgaacagcgaactaacggtgtaaatcctacagacatgcacgtcaccgtgatacgccaaattaacaaaaaaaaaaatgttactgggaatgccacacgaagttttaactagaaatgacatgggagaacgaggtacgtggtgacggtgagttcccactgctgctgttgctgttgctattgctattgccgtgaggctgtgcacccgaaatgcgtgacctcataatggagtcaaagcgcttgacttgccggtacttgagcatcgccacacctccgtgaccggttcgagccgtgaatgctgcggtcgcttgcagataattgtgaagcgtgtcaagtttgtcctctagagagacgagtggctgcggggtgaagccgccgctctcttccgtccgatccttcttcttgtcggccatgggggcacccatgcgagcgcagataaagttgtgaagacgacgagcgtcgtcgcgctcttgctcccaaatgggcttcgggggctccaccacgagcgacaaccgcctcgagcgcgtcggagacgacgtaggcgatgatactccagtcaaggatggagcgcgcttctcgcgcttgttggcttccacttgcacacaccagtcatgcgcgtgctcgaggtagatccacttgcccacgggaaagatgcacaacatggcgctcttaagcagctgggaggccttgatgttcatagcgaaggtcaccgcctccatttctgaggaaaagagctcgtgcacggccacgaacggctcctcgtactgcgcatgggccgcctcaagcttcgacagcaccacactcgcaaccgcaaaagtgcatcgagccgtggtggtgcctgaattgaaagttttccttcggggtggcatgggcggtcgtggttgatcgatcacgtcggtgacgctgccaggcagagatggtcgagcttcattgttgttcgacacgctaggaacccgagacatcgccacttcttggaatgacgcgaagtgcacgccaccgtctcctgcacttgagtgaagcgagttcgtagactcttcaatgagcgggctgcacgtagacatcgatctcatccgtggactattgccactcatttctgccacttgctgtagctggagtcgctcctcgtcaactttcgatcgatcggcacgcggcatcagcgcgtacgtcttgagcggtaaagcgaagtacttgaggttcgtcactcccatgctctcctggaacctctcggctgcttcacgaaccgcaaagagagacctagctgactgcagaatttgaaaagctggagactttttgggagcaaaagtcgcctctgttcgctcctcgccgctctcgtctaggatgacaaagaccgcataatctgcctcactcgtactctcggtctgcgcagtaaagcgggacggtgaatacgccttcgatggggaggcggagggttttcgcgttggtgaagtggaggtggccttgcgctgttgtactctcccgtttcggacatcgggggcttgcggtttgcttcctggaggacgagagaagatgaagttttcttgcagaagttgactcaaggcttgtgacgtgatcgttaagctttggttcgagtttcgtacactcggagacggctggcgcagcggtgataccgaagaagatcgagaggaccgacaggtttccggtgcttgttcgtcgccaatgctctgctcaacctcctccaggtgctttgccgtgcgattccacgtcgtaccaatctgcttctcgaccactttgatgtcgaaaaatgccagcgggttgccctccttcaagacttcagcttgtcggcgctcctcggctgccaagacaccgtctagctgtcgctgccgggcgacgctgggtggtgcgtccacgttgaaggatgcgacgtagttgccgagtgtttggtctggattgaaacatttcttcatggccttagtctcttgagccagcagcagcaactcgttcgctgggaccagggcttgcctcgctgtgttattgctcgaggccgtactgcgagaagtatcgggagatttatcctcgctcacaggagcaagaggaagtcgagggagcgtcgcccctcctgagggttgagatactttctccgactcggttgtctttgaagtccgcctcgactccggcgtttgggctgccgcagcttgccgtgtctgcgagatctttgcggtagttccggtagagggttctttagttgcaccgcggcgcgttgccgccggagcagacggcaaaatcttctcaatgcgttcgtggtttacatgttctcggagcaccttctgcttgtacgcttcccacttctgcgtcttgtggaaacgatccaagtacacgatgctctccgcgtgcgactgggctgcagcgcgcaaggtttctcgagccgaacgcgacagacgatggaagacgtcgtactttgacagaagtagcacctccactggagtactcgcgctcacggtcacttctcgatgaatcacctcgttgaaattcgcccccgcagcgctacagttaacgcacaatccccgccaattagcacacaacatgtagatagtagtgtcaaacgtactacgtacgcgtcatcgccgaccacccggaagcgaccgatacgctcaacgaaaacctcgtgcctcacttgagtgaacggatctgcgatttccttcgtgacgacgagctcgccgcgtacaacgaagtagacgtgcgtggcgcgatccccttgacggtacagaacactgcctgtagacaatttctgctccagcagcacgtacgacagctctttgagcagctcccccgtccactcgggcgtctggaacatcgggatctggtctagcacgcccacccgcttggccatatccttcttctgcatccgacgcagcgtcgagttatagtccttctcacagatcaccaacaattgacactcttctcgcgtgatgaccgtcgcgctgcgcacgcctcggcctttcatcagcgcgagctctccaaagtgagctccttctgttagattcacgagcttggtcatctgcacgttgcctttgaagtccttcgagttgatgttgacgtccacggagccgctgaaaatgatgtagaacaagtcccccacttccccctctcggaacacacaggcccccgcaggcaacgtgaggaagtcaacgacgagacagagctcgcggacgaaagtcttcggcaaactccggaagaacttgagcgtctggaggtactcgctgagcatgtcgatgtccgctttcgtacgcgcgtgcttcttcttggtcagcaccttgacgtactcgcgctgggtgcgctgcacggggcgctgcacgccgatgccgttggcgatctgcatacgcgagaggaactccagctggtcgttcttgagcatcaagttgtagtcgttccgcgtgatcttgacgagctccgtagcgctcttggacagcaccgtagccgcgcgcacgtcgttgttgagcagtgagcgctcgccgaagtagtcgcccttgccgagctcgcataccgtgacttccaccacctctccgaggatccgctggctcacgcgcacctccaccgtcccgctgaagacggtgtagagcgcgtcgccttcgtcgccttggcagaagatggtctcgtccgggtggaacgtcacgcacgtcatgcgtcgacagagcaggtcgagctcggacggctgcagtcgctcgaagtcggtcgtgatcttgagcttggtggtctggaaccacacgccgagcgcctgcaggtccatctgcgagcgctgctcgccgtcctgcgcgagcgcgcggcggcaggactcctccagtatgagcgtgcggccgtacaggtgatggcccttggacgtctcgtccaggtcgaaacccgagtgcacgccgtcaagctcctcccaggcctcgccgtcttcctcctcttcgttgttgtccgctctgcccgaactgctacctgccgcgccgtcttcgtccggctcgagctgcttgcgcctcagcgtcaacagcttgatccagtgcgccatgaccctcgactgctcctcgggaatcgtagccgcgcgtccgagctgcttgttggcgaccagcgcctgctgcaccaggttcttcatctcccggctcttgagcatctgcgccagcgagatgcgcttctctgacgcggcagcccccgctccagtcgagttggacgcgtgtccaaaacccgtatcgactgcgttgttgtgtcgactcaccctgcgcaccacactcgacatgaccgaggaccacgaatcggtcggctgctgctgctgctccgcgtccgccacgtcctccatggacttctgcagcttgcgcatggagatgatcgactgcgcggctcgactgaagccccgcagtctaccgggttggctctcgctaggagcagagctggagctcgtagtagtggtctcattggaatcgtccgcggactcgttggtctccgatacagcggcagcagtgactgctgagctcgtcagaggcgtcttggctctcggagtgactttcacgctcacgattcgcccgcgatcactacgtccgcggccttttcctcggcctttaggcgtcgatggagtcttcgggtgcatcgcaaacctgtacaatagcgttgaaaagctccgacaacttcaacgtctataaatggctacactgcctacatgtagccatgtgcgtcaccatctgaaggcctaactcccatcatgctatgatgttcatgaggtccaggttttaagccaatcaccaggccttccttcccgtactccagcaagtggcccgacacttcatggccaccacgagcgcggagactcctgcgcagccagagacgcaacagacggcagatcttacggtgtcgctgcctctgcaagacgccggagcagacgccgaccaagttgcaagcgcggaggtggcttcggagacgcaggagacgcagcagaagcagacccagattgacgcccagagtgtagccatgaagagcagcgcagacggtgtcagtagccgcaccagccacccgagagctgcagctgcagcggccaatgccgagatggtgaagcaggccaaagacgaggaaacgccattgagcgtcgtgtttgccaaggccgcgagcgaggcagcagccagcaaaccaccacaacccgccccagtagtagtacatgaagccaagacgcaagatgtagccattctgcctgatgaagacaaagatgtagccatgatgaaggaagagcagcctccagctgcggaaggcagaagaagaccgtccagagctgcagctgcggctgcgaacgccggaatggcgcgacaggctaaagaggaagaaggttcgctgggcatgctcatggcgacagctttggtgcgacccatgaagcaggaacagcagatagtggagtccaggactagtgacaagaagcggtcgggtgagatggctacacctcccgctaagaggtctcgagtggtgggtagcaagaatgtggcgcaggatatgctggagctcgctagtgccgagcagcagccgcagcgaggcaagaagcggcgacaagcgcccgtgtttgaagctgctccgatcatcacggacctgccgccgctgccgttcacgacctcaagtcccgagctcaagctgaagaacaagagcaagaacaaggccaagaataagaacaagttagccacaaagcccaccaaggcgaagcattcggcggaagagggagcaggagatgacgcccgccactgtgagttctgcaggaaggcggacaatgtgtgcgtgctgatgcactgccacgcgtgtcgtcgggtgtaccacgccaagtgcttctggcacgcgttcaagccgtacgttgatgcgaaggtgccgattctggaccagctggaggaactgcagctcaaggcgcctgagcgtcgcggcaacatcttccggtgtgcgtcgtgtagagctgcgtttgtggatttttgcgagagcggcggttatctctgggagtgtgactgtcccacgtgcgcgcagcctgagaaggtgattttctaccggcagcggaagctggtgcagatgatgaacgacatggagctagagaagcagcgcaagaaggaccagaaggacaaaagcaagaagagcggcactgcgaagccaccgccgacttcgacgcctagccgctccaactcgacgtcacgcagccgacgtacacgaggaggcagcgcagcgctggatgaaggagtgcttaacgcgcggacaacacagcctccaacgtcacggggagtgtcacctgagagtcttgacgtgaagatggaagaagacaacaatgccgaaggtcgtgatgtgaaaacggtaaagaataataacgccggccctgtggatgcggttgatggcgagaaaaacgacgtagtaaaatcggaaagcgagaccaaggcggagccaatggacgtggacgacggggttgctgcttcaggagagccaggaagtgccgagaagactgcaaatgaactggaaatggagcaacaggtcagcgagatagcgaagcgacaacaggagtcgcactcagcagaagctgccacgcagcatcaagagaccaagaaccaggcagagctgcagcaatatgctgctgctgtcaagaaagagcgagcagagcctcaggtaaaccaggaaccgatgtcctctcaaaagcaggaagaacagcccgtgaaggtgaagtacgagcctgttggagagcccgagcagcctgatctgaaaggggacgagcttgttggcgcagtgcgcgtacaccacgaacccaagactgagcgctggtgcttcccgatcgtgtgctctcggacaacgagtctgcgcgtctcgggtatgatgaagctggggacgtgcaagtggtcgctcaagaagagtgccgtcattcagtgcgcgtgctgcgataagctgttcagctatcccgagttcgtgcaccacaccgacagcagcttggtcaaggacgcgaagtgtgcgacggaagacccgatgccgtacttgttcgtcgagcaccgggacacttcgctccacacaccactcgacgatttcctgcccgctcttaggagttgggctggtcgtcagagcgcgaataacacgcccaccaagtcgcgcagagggcacgcggtgaggcaggaggcggctgcagctgtcgcaatccccacgatgaccatgacgaacccggaggccgccgcggaagcgctgccagccacagtatccagactccgtgtgctcgcgctattcaaacgccccaagcctcgaagtgacaagacttcaactgcggcgcgcttgtcggacccgccaactctggactttttggcgcaggtggtgtgtctgtcgcccaagtacgtgatgaacatgtcgaacgggagcctagtagaccgcgtggtgaggtcgaacacttcggtccccgacgactcgttcccgcgcaagtccggatggttggccttcaatcggtccgcgaccatgacacgccaagtcacttgcacctgctgtgaaaaatggttcaatttcgacacattcgtcgatcacgctggcattacgctgaccgatccgaagaagaaggcacgccatctaatgtatgtcgtggagcggacggacgagtctgcgttggtgccgttcacctcgttcgcgacggacttggagactgtcgccaaagccaacgggctggattcgatcctggacgagctccacccgccacctccatcccctcgacctatataacaacaacacgggtgcatgcgtttgggatgctcaacggatgaatgcagtatcacatgtgggcccctgcaagcgaggcagcagcggagatggagatgaacgtttgagggtatcgctattgtaccaacaaggcaaagaaaacatgagcgcattgttggatttgatggttcttgtgcattttatctatgacgaagtgctagtatttgtttcatcgtccgttgactgtcgggcgacaaatcgcaaaaagattctaggattgctggttgcagttgctttcagttaggactctgctgcactccccatcaccatgccccttgtactgtacaccataccagccgcacagcatcgacttactattgcactgtaccttcacctcagtacacaccacatcgaactgaagaagattttagcagtaaagaccgatatcaagccccgatcgaagctgcaatgcccttcctgacaaagcgatgcacctatttttctcgggtcgccgcctcacacctacttttttgctttcgaaagtgcgtttaagctttagttttagccttttaagccatgtaaaaacattggttgagcgaagtatacctaacaatatcaaatacaaagtgaacctcgctagaatactatccatgggtaaggcctcctgagatcaagttgcccccaggctccttgaatatggccgagtatgttcccaggagcttcgccgttgtgctactcgccactcctcgcctgggagacggctgtcagagacgctttgtccagtaccctgtcgtgtaggaacacaccgattttctagtagatgtaggcacaatcccttaagacaacacccactgagtcacgatgagtagcgataactcagcaggcttgtcgggttaatgaatatgaacctaaagtcccagcttcacacccgttcctcgggttggtcgtttccccttgtgcaccgcggtttctataggcaaccagcaaagcctcagcacctccagtcacgaacgacgactggagtgctcacactaacctcacggtccctccaaaggaagggtcctggcctctggtaggctgttcgcgagggtgtcagagaaatctccgacggtaagatatcaatgggaagcacttaagctctaacccaatatacggcgacaattcgcccttcgtatacacggccaatctccttctactctgctcttgaccctgccggatgaacactcgctacgatactagtaggcgtgctcaccgacaggcatgatccccctaaccaggtttaccttggtcacgggtcgtccaccgtgcgctggcgtcttccttgcgcagttgagaggaaaagctgttctgtgttgttgcccaaagggcttatgtgttctatcttgtctttcctatagtccaatacaaatactaagtctaaacgtgtccgtttcggatcttctagcaccaacagtcgccatcgaagagtcgccgaagactcgtaggtacgcgaacgtaaggtaggtgcgtcttaggtgcgaaacctctgcgacgcatcgacgccacgatccatcgccgacatgtggtgtggaccacaacttcaacaccgggacgtgcgacggtgcttgcgacgaggagaccatcactcacggtgatctttgaggcaattctcgacaccataacccgcggtctgcaagtccgtagccaccttctgcgtactcggaacttccttcgctgcaatgagtattttgatcagattcttgccgctgaagctagctcaacggcggtggggagacgacaatcgtctcggccttgactcagagcgaaccctggatgcgattcttgcagcggcgaaggaggtctggctcaccaacgaaaaatacccaccctttcgtatccgaatttctgggcttcccctcgttgaagtggtcgatgaacttgacactaaagtagctgttaagctcgctgttaaaacagcgggctctccaacacctttgcgcccacttcgtcaagttttagactcttgaacaccttgtttggagtatgcacacgcacccagcccttgaggagctcgccttccgttcgcagacgtttttaattgtcctcggattcttctctgcgacagggtccatcttcgccagcgcgtcgtcttcgtagaatattatagcttcttgtcgttgttcttgttgcatacttgatccaactgccgatgtatggaccagagctcgcaatcgggtacccgaaccgggtacgtacgggatgtacccgagtgcgggtacccgaaacagtccccgggtgaagctcgggtacccgagagtaaggatagaaatgagtgagaggtttcgcatccctactcttatgaacttatagtctgtattgacccaacatccaagcatggagaccgagaagcttccctaatgcacgacatgaagtctctactgttgataaggatcacacgaagacgctaacgatgcggtctaatgcggacctgatttaatggacacaataccagaattcacagggggaaacgagcttttttcataatatacattattacttctttcatatacttagctttgacggttggtagaatgtaccaccacacagagtatattagctcaaattttacccgtcgggtgggcgcgggtacccgagtttcgctgattgcgagctctggtatggactctccaagagcttgtcctatatatgatgaaatggtgacgatgaagcgcgagactgcggagagagagaaagctgctggccatgctagcttgcaaggcaatggtggcgtcgcgatataattccgacgagcgtggcgcagtggtgagcactggatcgacgtagtgcaaggcggaagtgagggacaagggtgaacaagggtttggagggacgcgtcgaggtggtgggcttcggaccgacgaagcgcgagaaggaggggttgcatatctcttttagcaattgcatatcgtaggggtatatctcggtcgaatgccctagtggcatttggttggtgtatgtatacccgtgtgtttgggctactaccgcgggcacgtgccctggaggcccggcgaagctgcagcagtgcgcggcatcgggtgtagttagccgtctaaaccgcaacaatttcaatttccaaaagcttgtcccctgctgtgtcgagcttgaacagctcgcttgacgccttgtcgttgcttagccgctgatgcaactgctcacttttcgcccataaaagccttctggctgaaagctgccaaacagtcaatattatcaccgaatgcccccagcgcgatccggttcaacagaaacaaatcgactgcgcaggaatatgtttactgtggggtgcgtgcatacaagtcgtcctgctggaaagtcaaatgttcaaaagaccttttatttacacgctgtgcattgaagcagcgcatattcacgtggttctgcgaaccatgtgcggcttgaccaagacatcaaaccaatttgttcaagaaagcccgatattcgtctttggctcgttccgtgacgacgttgatccttcctccgaaaactttcttgtacacgcacttcctgcttgaaccacgtctcgaactgcgcgtgctccagttttgtagccatgttcttcgtggcccaaccctttttggctgcctgaagcatctccgcaacagattcagccttgtacttgttgaccaagatcgggatgattgccttctcgggcgactcgcccttgttaagcacaccgacgtattccctccagagcgggaagtgcttgcttgacaggaccttgtccactccagcgtcaagctttaagtaggtgaagatgtcgtcggccgaattacggaatagaagccaatccttgatttgctcggcgttggcggactttaacttgaggccgaaaactctctcttcgtcgctgtcttcatcgtcttggtcagcagtaagcttggacgtccgcaggaatctctcgccgttcgactggcgggtttcaagcttggatgccgtgattagtttgcggtcggtcgtggcagcagactcggcgcttgctgtgagagcagcgatcgccattagcaccacgcagtagagacgcatcgcgaaaccttggcttgcagttcagaacagctgcggactcgaaggcaaattgccaagtgagggctggaaacgcacctgccggaatgtcgccaggggaggagagcagtcgcacacgcactatttcttcactactgacggatacgtccagacatcaaaaaatcctttgaaacccggcaagatgatgatagttacgataagccggatgcacaagaggacgtgtattacaggcacaagcataagcttacccacctactctcaccgatggaacgagatcattttggttggtcgtcatgattcctgtgatgcttctcaactactacgtgcgttgtggctctcagggggtctggtctacaagcaccgaagtgagtgatatgttcgataggagaaaatgctgcggtcaagttatcccgctattcgttcacatcatccttgatgacaagcatcaccacatcagtgttgctggtgatagtaccgggatgggtcttgacaccccctttcgaacaaatatgtactcaacccaattctttcgtattgcatgcactgcagaagtagataaaacagcgaggtggcgagtagaaggtaaagctaggcttcagtgctaaagtttccctcacgatttcttacaaagttccatttcacgcagcacttcacagtttagcattcccctattcttgcattttggtcattcataacgaagagtgaagactgcgtctgtagcgcaaaatccacatggtagtctcaaacacttgcaaaaaccgacaaaaggtaaagaaatcgaagacgcacatgcgctgaagctcagactgcaacgaattgagcatttcgacaaaaatagcctcgctttctagtacaaatctagtgcaacggagaaaatggaaatatttgcgttgtaggagctacgaggattgtaaatgctacaacgttgatggcagcactcaatcccccgatgctaacacgccaggataatacttcaagtagaaaatgctcagcagctgcttaaagtacacctgtacctacttgtatgccacaatgcgagcggcacaatacattcgacatagaagacaatagcgagatattcgcggtggagctaacctcacttctgttccttataacttgattgataatatttcagattgtagtatgtttcttgtagctcattattggattgtaaaaattctatgtgttagaatacgcttcccctaaccgaggggcacagagcattaatcttcctttacaagctctacttagtcgccttcgtgaacaagtcgatatactgctgcatgagctcgaccacatccttatttcgtggcttgtcctgcaggcgaagccaggcgtaaacccttgatgggtttctcctcttagacaaccagtatcccatcacatcccccagcaagtcgaacgccgtcttcttcgtgctttcctttttgtgtgcttcaatgagcatctttgccaaaatttcgtccttgaactcgttcctcaatactgaaattgcgctgacttggtctttggggatctgtttgctgttaaaatactcggtgaacttgagccaagagggcagaaacgggctctcgagcaccttatccccgtcattattcagcctcagcaggttgtagacgctgcccggcgtgttgccattctggaaccacttctccacgatctccgtgtccagccgcttggcaatggcttccgtttttgggttcttgctcgccgcttgaatcatttcgagcaacgacacactggagaatttgtccagcaacgtggagatcgccgagtcctcgtatcttggaaatctgtagttgaactcgtccaggtacttgagccacgcgctgaagagcgggtctccaagaagagtctccttgtcggtcagcttcagcagatcgaaaatgtcgtcaggcaagtggttcttcgggtctttcatccagctctgggtcagctcggcttgcacacgtcttgccattttctcggtactcgggaccttcttggccgcgatcagcatcgtgaccagctcttcgtcgttgtaggctttcctcaacggcgagtcgactagtttccacacctctttttcgtcctcaacaacatactcccatgacttcaaaaacgagaccttttccttcgggttcttgttgttgtaagcggccatgtacttcatccaggccgtcacttgaggcagttcgaaaaggttcgtcgtggccttgtcgagcttcaacatcgtgtacatatcgtccggcgtcctggttgcctccgtctcaatccagcggtagacctgctcggtctccagccgatcggcgaagaccgccgtgctcggcaccttcctagccgaaccgatcatctcagccaattcgaactcgttgtagtgagccgctagtgtcgagatcaagctcgtttgcttcttgggcttctccttgttgaagaacttcatgtagccgagccacgagtccaggagcggactgccgataagctcctcctttgccttgtccagagccagcagcttgaagacgtcgtccgcggattgcccaccagcaagccaggcttcgaactgcttggcctggatgcggttggccgtggcttcggtgctggcgacgcgcttaccctgttcaataatcctggtcaaagcttcgtcgccatagtgagcagtcaacgtcgcaatcaacgtcgtcttcttgctggggttctgctcgttgaagagctccaggtggctgatccaggactgtagcttggggttgctgaggaggtcgtccgcggccttgtccagcgtcagcagcttgaacgcgtcgtccgcggactcgcccttggcgaccaaggccttgagctcgtcatcgatgttggtggtcgacttcaatgtattggccagcgtctcaacgcccgaggcggtgatgcccctctcttcgtcgtcggtcgtcctgtgggctctcaagagccttttgatgggggtgtcgagcttggaagtccatagttgagtagtggtcgtggattggtgggcttctgctgccgtgaaggtgacaagggctgcggacgcgatgaacgtgagcgggtggaggcgcatcttgtgtcagctccaattcaggcaacgtggtgccccagaacttctaggctgtacaattagaagtggtggtgctggggcaaatcgcaaaatggtagaaatcaaggggcaccgatgcttcgaacagcaaatccaacatggtttgttcggactctgaacatgataggcttgtagatggtgagcgggatcgtacttacctgaggtaacagcatgtcgtgaaaaatacatactttgaaaaagagagtgaaaatctcatacacgtgcccgacatttgcagacgtaccgggatagtgtttgcaaaaactctaactgtattgctacacgctagcgtttgcaaactgtttgttagtgtataatgaatcgggctaacatggttatggagttagatgggatttggttattcgtcttaaggctcgattgttagccgccgaaagctgagtggtacgagaagttcttcttctctacaccagcaatggtatcttcacgcgaatcactctggcaacaccgtgatgcgtatacacggactatggatttgacaaccggtaccaattttcttgaggagctactcaaacatacaaacgcgttcgcaagcagtgatttactgtattgtgaaaaacaaacaaacaaacaaacaaacaaagggtcagcggagtacactatacccgcagcaggcgtgtccacagcagcatgaggaattgcacaagataagtggataggaattatatttgaaaagctgtgagcctacctacgacaggtatccgtaatttttctttagtagtaggcaactacctcgaagtataagtagaatagaccatcgcacgaagccagcacccgcctgctgtcgcacagcacgcgggtactaacccaggccattacccgtcaagcaagcggagttgacgcgtgttagccaaaacgtgcttttttagggttctgcccgagcgagcgtagcgagcctttagggtcggaggactgcgtggaacgcgtagcagggtgttagttaaaaataaaaaaaacttcatctttcttattttttagggggcttttttaaaagcttaaaagctcattaaaataggtcctctattacgttagactcatggtcaggccactttaaatttgagattttcggcgaaaatgacaaaacaaaaaaactaagcgctgaaaatgctcaaaaacaagaaggttaccatgacccatgaacctgcaatgagtgggctccaacgcgaataagaagggcctaggcgcggctaaacacacaatttacaccccctaacgtcccacttaccttcgctcacggtgctgcctgcttcaaaagcagtgcttgtcaaggcaaagcgtgcgatgaagtatgtagcatactgtatgtcgtactggtgcaaacccgcttttacaaagtgtagtccgacaccaagcgatgctttcctaactatgcttctattgagggcctcgatttagtgaacgcctgccaaaagtggcattcaatcacataaagtgtttctctaaattcgtctctaaatataaattgtgcaaaggtcgataaatgtgagaggtcggttttatgccaccaatgtcaccaagttgctataaaagagtgtgatttacttttttcaagattacaattgtgtagttgcaagataagggggcgaagagacccttggtttactgagaatataagttttcttaaatcggcttatgcagaaagcttatacactttggcaggcgtccagtgtactttaagtaagtaccgcaccgtaaaattcggattcaatgagactttttgattcagtgcgacagtggtaaaaagtaaaacatacagctaacttttgacttgaaaattgtatgtaattactttttaccatcgtaaaaacattaaattgttcatatattttctagatctttatacgacaaacgaactttttaccactgtctcattgaatccgaatttgacggtatgaagggataccatatgttggagggcccagatcagccaatcagaagccaaatgcaaaactggcctggaaaacactaaaaaaactagctattttgcgtttttgcatccggacttttcaaaattagagtggcctgctcatggttcccaatctactgtcgatattgataaataacggtagatctacttatgtgatgtcaagattggatcctatccaccgataaaatcgcccttacctagtttaacctgagcatgcatcatggcgatctcgacagactcttcaggttgttgcggtcgtgtgaagaagcgatagatgacacactcatcgttctcgtgtactaccgagtggcctcggctgtcgggttataactagtgtactccgcaaatctgttagtgattttcaaacacactaactcactgtgaaagctgtttgcaaacgcgtttgtatgtttcccactctatcagtagcatttcaaggctaatggctcctcaagaggacgaggactggacaaatttgcccaggacttgctcatttacgtatacaaagcacgccagtagtctggagccttgtctttttgtctggattccagtggtcgggttgtccggaactcgtgcatgcttccgacgattattgtaggtatattgttctttttcgttatatccgcatcatattttaatactattaaaatattaatacatgtagtgatacaatgctgcgggagttagatacaagcacactgtaagggaaatgaccaatctggccaattcggagccggttctgtagatcaatcaaataagttctacgcaccaaataaaaatctgatcggccacttatagtgttggccaggaccatcattcctgatgctgttgtttggttgcgcctattgcgcttattttaggggtcacaagctaagagttgatcgaataaatcggcaaagagcatcactttttcattgactgagtcgcgcaatgtctcttagcgtagctgaataaaaacagaaaaacaaaacataatgaaaacaatcaataggctgtagcagttattaacggttggcgcctatggtatcagtcaaccttgcagggatttccagtcgcggaactgtgtgtgttgtagggatgtcgtatacagcggttcaatgatgaaggatatgagtcgcttcatctcctctgctgattcgagatctggcttaaatcttgcgatgtagtcgtaagtgagcttgttcgtcagtgtaagcgttctcaagagagacacatacagtgactgtgtaggtacgccacccgatctgtgaagcggggtgacaacgacgccatcggggcaagttttcccctggagtttttctgtagtacaagcaaatgctggaaccacaggaaattgcttgatggtgatagaagcttgagccaagtttggcatattcttaaccctttagtgatcaatattattcttggatttagtatactgaagcccctatagtaaagtgtaaaacatgcataaatgcttggttttgcccgcaccccgcagcataatatatcattttgcaggggtttaccaataattattgcaattattgttgtaaaacctcgcaatatgcttggttttacgcaagggatataaaaggtcaaaaccaatagaggggtgatttgattggattaaatttgtaaaaccaagcatattgcaaggttttaggaccaccaaccagaatagggttaagcttgatgttggaggagattcgaggtacaccaattacgcctggcgcaaaaccatctacgagaactgtattgcagtcgtccaggcgtatcaaaagcagttcgggtggggaagccagttgaattaccgtgggttcatcggattcgacgtcaacacatgatcgagactcgatgggaggatagaagccaatgacggtgccaagcgtaccattggcgacaacgttcttaagctcaggaggtttcctggtgatcataacaggcattccgacaaaggaatagtctcatggggattcgctgtgtcagatcgtcgttcgcatcaataatatgcttgaaaatatgctgtgatctcttggaaggttcatcggggaattcgtaaaggtatgaaccagtatcggcgctgatcttaaacgtcatcaccttattgatggcacaacggaggttgtttgtggaaacaaccaaggggcggaaaaatgtcgtggaagccgtgattgtagcgggagctttcttgactcgagagtttagggaagccaaattatccaccggtacacgtccccagcggagctcagccaagattcgagcatacaagtcgtcgtcatgggctctcatattttccgcgaggaagacgaaaaaattaatagtgttgtataagttgaaacctgcatcgaccgacctttcgctaacaagatatcaacacgaatcggctcaagctggccatgttcatgcagcacgaatcctgttgcctcggctagagcagcttcttcgcgccctgagttccctcatgggtgcgagattgtgcgagattttttgttgttgcttggctgtgcatcttccggcctttcacggaagatgttgatacgaaactgcacaagctgggcagagaaatacatgtccacgtcgcgggacttcagatattgcagcgcaatctgagttacccaagcaggtgccaggcttcgggttgccggtatgactacgtatccacggccaaccttatctacgtccctacagcatggatcgtggagcatgctcacttttgacacaattgttcgggggcatcccacatcgtgtttcaagctgtccactgtcctcacaagtgcccaagcttgtactgggacttgatctagcagaggactcggctgtctgtgagtgtatagtggctcgccgtcaccttactcatctccaaggcgttttaactaggatccctgctgtttgattccgacaggtttgctgaggttgcaaatacaagtagtgccatggaccctccgtgggcaacggtaattggtgcaacgacggattttgtcattcaggaagcatgaccaaccagtgatgagatcatctgtggcaatgtattcaaagggtcgagaggagctgtacagcggttttcttaccctcactacaagaagtgcagttgcaaatatggtgtgtgtgtcagcgaaggtgagcgatcatgcatcattgatgaagcatcaatcgggcgacggatactatgtgcgacgatgaaaactgggaagattttttaaatgggtcttatgcagaacaggtcttggatttgatcagactgtactttttctttgaacttgtgattggatcacaattgccacgctgtgacgacgcaaaaagtctcactttgaaacctcatccatgatgctaggaagccaagtctacctaacgctgcccgctcctcggtgatgcccgagtcacacctccacggaccgagccgttgaagcaccctgggtcgccgcccccggcaataccgcaacggagtgcgtccgaggaagacgagcaataccctcgccatgaggagctccaacgcaaacgagcgcaagccccaccagcagagcagcgagggggcatgactcatgcccccatgcatgagtgaggcctagaagatgcagcagcgccatcataggggtcagcaggtggacaagatgcgtcatggcagcacgaacagcaggtggacaaggtgcgtcgggagcagcccaagcagcagtcgaccaggaagtggcttataacgtcgacgggccaagtccgcctcgcaccacgtgtagcacgacatgctgcgctgtgcaagtgcgctgtgcaagctgtgctatttggtgcggaaagtgacgtggtggtgcggcagacaccgttcgtcgcggttactacagttgacgcacagaccggtgcgggcatcgtgtaggcggaggtgctcttcatgccccatgagtgtggagcgcgtcaagtccacggaggttatccgggtgcatcgctgctgttcctgctgttcaagcccgcgtagatcaccgctgcaccgtgcgccactcctcacttgtgcgctggccgccgctgccgtgcggctccgagtcgagcttgaacgcgcgcactttggccgtcacccacgaacgagactggcgcctgcgtatcgatgcccacgagacctccatggtgcatctggcggtgcgtgggttccacgcgtgtggacgcggagcccgacgtggtgtgcgggcaatcagacaaggccagctcggacgtcacgaagatgcgccagcgctgctgccgctcgtcgcccaaggttggtcgcagtgcagcgtcttagcttcagagaggttgttaccgtgctgcggctgtggcgcctcgctacgagttgaagcactttatttttctcttagccaaacagaagggaatcacctcgttgtggctactaggtattctaaagtacatgtaccatggtaaactaatttttcgagaaatatgcaaattgccaacagtagactgtcgatgttgattgagagtgtgaacgaaaacgaacccaggtgtgcactgctttgactgagagacgcatacagttctcagtgtacagaagtctcgaatggaatacaactgagcaccaccccatagaagcatgaacagcgtctggtattgcaactaatgtatcttgctgtcaagagcagttgggaagggaatgttctattgcggcggcgacgcgttctacctatttgatagtaagtctgaggtgatagtacatagcaatggatgcaatgattttgcacctgccaaatatctcttgagccaagataaccggtcaaaatggacactcttcacctggagacagcaccacgaactattgctagagcaggaagccgaacggggcacgtgcgaaggaacaagtcatgtcatgatccaaagttgtgaatgtttggttcaggtcttccgattcggtctcacaatcagcatgttcaaatcctggacctgatctgcataagaaccaaaatgaaggcaaccgaaaactgctccaacggaggggtgtgtggtaatcgattcgagcacttatatcctggcttccgtttgtggtacaggtgttgccgctagtgtaaagattcctcgtgacgcattcgtcattgagtatgttggggaactcgtagatgaagctgaaaagcggcgtcaaaactaccctgactacacaatgcagatacgcgagcctacaacggaccaccgagtattttacattgatgctacggcctgcgacaatgaaagccgattcgtgaaccactcttgctcccccaactgcgcgtttttttagtttcgttgtgggaacgctacgcgagtcggcatattcaccctccaggatattgagccactacaggaactgtcggtcgactatcgagccgctgccaagaataaccagctatggttccgatgccggtgcggatcaccgcgctgtgtcgcgcgtatgacgcctcgtcgctcgcctccgctgcctccacgcgccaaccctacctcgaccaaccataccttgaagccgaagcacccaaaaccgtaccgccaactgcacattacagactacttcaccaaaaaggctaggtataactaaataaaaaatctctgtaatacctcaggtactcggtgtccgtcgcgaccaacagcgcggcggcgcttacatgtagcttgaggcggcagcgccgccagcgcgggaggtgtggcgagatgctccagttggtggctgcgcgaaccgctacgaaggctgcacagcgtcggcactgtactgcactgcgccgcgtcgtcggtcgtcggcactgcactgcgccacggtccatgggcacgctgatgttgtgcgatggctggatgaaaatgtcgcggtgggcaaccgacgccgcacctttgcgtctgctgtgcgcttcctaaaccaagtagtaaaataggagcaacaactttgccagcgcgccacaggaggccacaagatgagcaggccacaacaatgttggggtggtctgggggtcgcttgcgcgtgaaagaagccgatttaaacgatcgctcctgacatgcactcccttgaggcgaccatcactcctcatctctaaatctagacttcggtggtcgtcgaggctggcaccctctcgtcgtgagggtgccgaatacgaatacgtaaataaaacgccagtagcgtcggccacgcttaaacggggtttcagatttttaaattagggtcatatatttatagaggtctttttagcgaacagccgctggaatactgaaactgagtttaaccgcaaatagtttaaaacttctctctaaatataaaaaggaggaggtcgcgttgcctcagcgactgttatgctcttagcttacgctaagagaataccgttgctggtttttacttttaggccgtgttcgacttgcatccaatccagttgttttaggccaaatgcagccggatttgcttcatccagctcgtttgcgatctgaaacacccaaaaagcgatccagctcgataagctcaaaagagctggatttgaaattcaggtctaggcaaaattattaatcgggctggataagcttccaaaccaacaatttgtctgaaaccagccctttttgaatcgagtcgaacacggccttaggggctggtcaggctggctggtgctggttctcggtctggtgagcgaaggggtaggcaaactactcggttttgactctgtctgctttttgtccaaaatgaacaagacataggcactttactcaaaacccgagaaccacctcggcgattgagttctcgggttcttggcgaattggctaagttttgttcattttggacaaaacgcagacagagtcaaaaccgagtagttcgcctacctatcgctcaccggaccgagaaccagcaccagccagcctgaccagccacttatgtagatcaatagttacaagcaaaaaaagccggggcatgaaaaatcggcccgagattggccatttatttccgttacccatgacaatgaggcgcaatacatacctgcataaatctggcgattatgtggtcgggcttgtctataaaaactcaagataaaagtgatgatcacactgcacaacagactctccgtagtgattatcactatacagaggcataactatctagacatgtaccatattgacggtacaatatcgttcaacgtgttatgccgccatttttgcttgcattgcgctcgatacgaggtagcattatattatataagtttgattgttgcgctggatattatattatctaccagttgttcagctatataccaagaggagggatgatatactggccactattcagatgtaattgggaggactgcccgggcaagctacaacgcggaatctagtctagtacccaagctgtacgctacggtaaatgcacgttccagaatcacagcatgcaagcgttactaggatgtgagcgatcacgaagaatccaagtccattcgaaggggtaactgacccacgttgtcggacgtgcttgtcggtcatctaaaaatgctaatgactattcgggataccactacaaagaggatttggattattacgatacagaggataattaatctattatggaagtcgtcgcctggtccagcttgagcagtagaaacacctcgtcagcgggtttccctttcagcttcaatcatcgttgcttgttgcgtgttggttggtgaccttcgacactcctgtcttgtccacgtttttttgtttgttgtgcttaccgccgcttggaatgcattattgggtgccctgcccccgatattagagaactttagaagctggaacatctcttggacttggaacaaggaaaatctaaaagatctgggtaaaatccagatagattacggatagattacccggcagatgtctcaagtccagaagagtcgagttgttcaaagagttaggacctatttttggatcatctgtatttcatacgttttttgtcaatttttgttccaaaaccacgacttagtccagcttctaaagttctctaatattcctctatcacctcccgtttacgcgtagaatgcatactgtactacattttaagaaagtcgctaatttacatgttagtatgagatgtcgaattttcctcatgtgattgcaactagattttggtgatgttgttcaaatcttgggcaacatatacagaattctgcccgaataaggaacgggtgtacaactaactaatagcctcacatatttaatattattttccagtcgatgtggcgatagggggatgtgcaaggtactgcaaggtactgaggtactaaggtgaaaaatctagtgccaatcatcagctctccaccctcgtttgaaagatggcgcgcatttagcgatcttactagacttcaaactacatgtaccgtagtggtagactcgcacttttgcttttgcacctcgccccacaagccccactccacccatgaagtccacaccgtccaagcgtctccgcctcacttaaaatgatgcaggctctagaccggcttggtagagggctcgataatccctacgaggtcgaccagttgacagcgctgttgtggtgcgaggatgcctggtcaaaggaaagtgcttcgaccatacgccactgttggaatcattccggactcgtaggtaaaggttcattttaaaataactaaatcagtacattggaaaagtatactcaacttaacatcattttatatattctgcgtctttatatatatcaggcgttccttactcgggcagattactgtaatgtctagtcacccgaatcttttgctacgcaaattgtactatagaaatacccgcggattcagcaatcgtcgtctcatttattagcaataaaataagtaactttgctagcgatggtattgttcaatagcagcgactacatgtagttgagcgtaggcttagtactgtaacagaggacgctatcattcagatcattattgggaatacgctgctaccaccgaatcttgagggccaaatcggtgtgatttttgtcaaactttcagtaattttaccaaatctggcctcgtagcatcaatgcctagacaggggtaggggtttagggagggagtgaaatccgatccgtaaaatccccccaaatgatcgcttcgatcctgtagatcacgcccaatgcgcgtgcattcagttccatggacgcgctcggccttccaagagcattccgatgagccctcatacggcctagttttggagaaatgagaggttttaggctttttgacacgcttcagtttcaggattcgagtgccatgacacccgtcctcggcagacgagcctaaattcggtggtagcaacaccagcctcattattgatagtcgagcaactctctactggtacatgtatcaaacctatggtaatatagaaattgcaatgatcaaatcgttggacggtggtacctaccgaaaaacggcatttcagatgggtgaactggaagttgcgaatgacttcaaaaatgatcgtagtgaatgggcagcgtctcgaaacttgccgggcattggttgctcggcgggcaaccaattggtggtacagtacacttttggcacggtacacgtacactacaatacatccgcagtaaatgtactgttcatgtgtaccagagagaccctctccccatccaccgtgcgatcagcatgcaaagcatcgggtttaggagaggtcttccgatttgctctccgaacaatcacatgtcttctcttcggcgtcagttcgcagtttgcattccaaccaccacctggagctaacgacaccgagagattcatgcgtcttcatcaactcgtagctgtagcttctgccttgctactgctagtacaaagtgcaaccgctgaagttacttctaatggcaaactccggaccgatacggccgtccaggggggtttgagggcgcacagggcgacgacagacgaggaagagagagctctccccgtctcgggcttggagacgctttccagcacgttgaagtcgactaccactatcgatgacgaactcaaggccttgctcgcgaaaggagagagcgcggacgacgtgttcaagcggctggctctaaacaaggcggcgggcggtcttcttagcaacccgaagctgcagcagtggatcgactacatgaagctcgccaacaagcagaaccccaagaagcagacgagcttgatttcgacgttgacggctcactatggagacgatggcctggccaagatcatcgagtcggccaagctagttccggacacgggaactttcgcgaaacgccttcaaaccgagcagatgtaccgctggatgacgcaaggagaagctcccaaggatgtcttcaggctgctgagactcaacaaggccggctacaagctcttcgagatgccccaggtgaatgcctggatgaagtacgtggacacgttcaacaagaaatatcctcgcatgaagacgacgatgtactcggagttgagaaatcggtttgacgaggaaacgctggtggaaatgctcatcaaggcacggagcgttccgagtacggaggccatcgcaacgcgggtgcaagcggagcagacgctgcgctggctgaacacggggaaatcgcccgaaagcatctttactctgctgaaatttaacagcgccaagcagaaggacactctactcgaaaacccgctcttcgtctcttggctcaagtacacggacgacttcaacgagaggtacccgagacgcgaagaccttgcggtcacctcgatgttggagcacttttcatctgacaccttggcgaagatggtggtggacggaagcaagagcccaagcattcaaagtatcgccaaacgactggataccgagatgttcttggcttggaacaagaaaggagacgccccaggaactgtgtttactctgctgaagctgaacaaggctggggataacctgttcgatagcccgcttctaactatgtggcagaagtacattgcgttcttcagggagaagaaccccagccagcgagtgaacgagctgtcgatcttgaggaaacacttcaacgacgcaaacctgtccaagatgttgctggacgcggagaaggtgcccagtacgaaggcttatgcgtcggacctgctggatgatctgctcattcgttggatggcgggtgagacggacccccgcaaggtctacgcgtggcttcgggttgagggttctgctgaatatgacgtggccaggggtctctatgactcgtacgtcaagttctacaagcaacacactgcactaaatagctgatgaaatagagatttgtggtgaagcaccttgaaaactatttgctcgtcaaggggggtacgtgaggattcttctactgtagattcgacgagaaaattgcaacgctttcaacctgccagcgtggcgtgccagtcggtatacgcagtcgatagtagacggagcccaagacgtagatcaactcgcaggtgaaacttgtggtacagtcacacctctataaatgacacgctgtttcagttaaagaattgatcagataaagaaatggctatacttctaatggctacatttcatatgttaggtgcacaatacaagggctttctttacctggtacccctccagcattttcgtactcttgttttgtttcgtcttcacacagacagaacttaaccaataacggtaggcgcggtattgtctgttcctactccttcttctcattggtattagcagaatcgcatcccctcaggacctgaggctcaggttgtacgtgagtttcaatacagtgaggttataggaatatttgttgtcccgatatcctgccaccatgcctgcagttttatattttgcttgaaatctactgcatagcccctagttgtctcgacatcataatatttttgtttttcgtaaaatatatatgtacgctgcgctgattgtaaaatactggggctagcttatttatcagtatttacaagcttgcagttactgcaaactctttgttccaacttagcatcccaaataaaatttctctcttcgctcgatttgttgtggcgggagtagtagtagcaatggcatacgtgggaggaggcaggcaagtgattgagaaaaatatatgagtttggatctattactacggcgtccatttagagggttgagacgccaaccatggcgaccatttagagaataaagaggtttttgatcagttatagaacatctatagtgaaatccatataatcctgtttgaatcctaaccagatagggaacacatagtcagttagaggggttcatttagggaggtgtcactgtagtcacaacttccaaagcttccagttggcatcggtcttctctttcacattcatcagcttggccacgtgcatcggctgcttctcagcgaagatgaactgcttgagcacctccgtctccaacttggtcccgaattccctggtcttggggctcttcttggcggcttgaaccgctctccataggtcttgatccttgtgggttgtggccaacatcgtccgttcaacaatcttaccagggaaggccttgttgaagttgtccatgaacttcatccagcagaggaacaaagggtccttcaacagctttttcagccctacgcgattgagttttagcgcttcgaaaacgtggtcgggggctctagaggcagccatccagtccttcaacagtgcgccctccatacgtagagcagcgttcacagagctcgggctcttttccgccgccaggatcatcttgacgacatcgacgtcatcgtagtgcgcgcgtacgatccagcctgtcgtcatcggctttctcgggttcttggcgtggtacgcatccgtgaacttggtgaatatcgtaaagagcgggccttgccaaggttcagccgcgtgaagacggtctctggagacgtctccatgctcagccagtgccgggtgcgtgcagcctccagattcgtggcgatgccccaagttacctccacctacttcgcactaataagcatcttggctacagcttcgtcgccaaattgggtcgttagcgtctcgatcagcgtcgctttccttgaagggttgtcatagttgaaaatgctcaagtaattggcccaagtgttcaagggcgggctggtcaatacgtcgtccaatgagttgtccagcttgagcagcttgaatacatcgtctgggcttttaccgagccatatctggagctgcgtcgcctcgactctattaaggatttccgatgtgcctcccgtcttcttggtcgctagaataatccgagccagaccgtcgtcgccgtagtgagctgctagcgtcttgtacaatgtcgtcttttccgcaggattgttcctgttgaagatctgcaggtacgtgttcaaattgttgagcagcggactcgcgaacaggtcgtctcctgctttgtccagcttgagcagcttgaacacatcgtcggcactgttgccagccgcgaaccagcgctgcatctgctctgcctcgagccttgaagcgactaccttcgtctgtttcacctccttcgctgccttcagtatctttgccaggacgttgtctccgactgagccgttaaatatagtgagattctctatttatttgctacacccaattaatattttttaaaatgttggaacttggcaaagcaagggatgcacttagtagttctgagcaaccagtacatgatatcctcatgcccatacgacgctgatccggacgcttacaaagtgctacaccgattttaatcgctttttaaaaagctggcaccgcttctggtacggccttccaaatgaagcgaccagacttggcacacttggttgctggatttccgtccatggaagtagatggcattacgaagccgccacatacttcagtagcatggaacacaagtggtgcttgaacttggaatcgacaagtcctaatgctgcaatttggcgtggccaataaagataacagattttgtggtttctatgcgtgtatatatttaaacggcatacaagtatgatcagagctattgcacgtatcccgcttaaatgaagtagccttccgacatttaaaaaaaatgacggtacagtaccagtagagcactgtaaataatctttaacactctagcagattgcggcagatccccccacgttacctttttaaaataaaaaaattcatgcgactgaattcccagcaaataactgcaaggttgtagcagtagtctttaggtcgttttccccgttaattccatcaatgcgcagtgcgttgacgagcctcagccgcgagttggtcccatttccagtagcgcagcatgaggaacgtgagagacagccacgttgaagtgatgccaaagccgattccccaccacaatccatcgacgcctaggtcacccacgaaagccaggattgcacccagcgggatccctcctccgtagtatcccagtacattggcgatggccgcaggtttctgcttgccagccccacggaaaaccccctgcatgacagcgttgaggccgtcggcgatctcgagaggcgcccacatggccatgatcttggacgcgaggtcggcgctctctcctcccccatccaggaacaggagagggatgtaggtgctgaggctgaagagcagcacggcgaagacgacagagatcccgagtgtaatccccagcgacaaggagcatgccatcttggcctttttgggctggtccgcgcccagactgttgccaactcggatggtcgcagccaccccgacgccgtagaacgccgtgtagaggatccagttgacgttcatcaacaccgagtgcgttgcgagggccactacgctgtttggtagcacgccggctaggattgccaggatctcaaaggcccaagattccaccgccagcatgaccatgcctggcaccccgatacgtaagaagagccggacgtagctcttggccgccttgagattccactcgtggccccaccattggcgcagttgagccggtcgccacatgaagtaccgtacgaggagcagtgcgagcgtgatgttaccgagcggtcgtccgaccgcgataatgttgaagcccagagacgtatggtacgcccgcgcgtatccagctgcgggattgacgacgttaccgaccactgcaatggcgacgaggggcttgacaatgttttgggcttgcatcgccttccggaccagttcgtagaggaagaggaacggcagcccggggagcatcaaccgggagaaatcccgcgacaagtgcgtgatatcaacgtcctggccctgttgtggttgcacctcgctgtctactcgactgggtcctgcgggggctgcagttgaagtgaagcgaatgctgcgacctgattggcggaccatctggggtcgcgtggatatgattgggcgagaccgttgaagtcggatcaacagctgtgattagcatggataatcacatgcattgacgagacagaccgtgcccgtcccaatcaggtgtgaccgtcccaactgtgtttgagtatggaccgtgcccgtcccaatcgagtgtgcccgtcccgggacactgtgattggctgacggcccgtgcccgtcccactcaagtgtgaccgctgcacatgcatatagttaaatgaagtcaaacgagggagatgctaggagagctacaggagtaggaaggaacaagcaggacaaagacaactaactgaaataaactcactttcggatttccttccttctgctcacatcgactacaagcctcattcgccactcttaattggcccagccacccgaggatcggctcggcgaacgcgttgatcacgagcatggggacgagggccacggcgaggacgattacgccggtctggaagtagaccccgatcttgtcgagcctcttggctccgtaagcttgggagctcagcgcgtggagtgcccaacccaagcgactgcgcagagacgttcaacagctacacgtccatggaatacatggcatcagtctcatgcattttgtcaactcagagacgcgatagccacttaccatgacggagattgtggcggcgtccacgtagtgctgcgagttgggcccggccatgttgccggcaatatgatggagacgaagcccggaagatactcgagacctgtcgttcctgtctgaattcgggccacggcatggctggttagatggggtttgttctacagtgaaatcctctgcgactacataccactgggaggattaacttgaggggctcacgaagttcctccttgggtttaagtggccttctatttgagcttaattaactgacctatagagcccttgatatctagtgagatgtgcctgtatctcgaacgtctttgagtgttgttgttgcttttgcagctgaggtgtggagtctgcaatcgttttccttgtccttgagttggggatcaaagctcctcctgtgctgtgggcatcgtagatggttgtagtgcttgtttttgccatcaacttagccgctcggagcgcagttccagcaggtgaaccccactgcaccgagaaaatcgcgttcaagtccttggcgagcgcggctactgggcccgttgcttggatgtcagccttgagttgttggagctgcacttgtagtttcttgtcaagactatcaatgcggagatacgtcgagcccaggttagtcatcgcattgagctctgtcaacccttggttcagcgttcgtgctgcggcgtccgtcggtgtgtttgttagccccaagtagagacttcctgcttttctgggaatccactgttgagaggccgtctggtggtagaggacccaccctcccgtggtcaatttgtccttagttatgtgcgtgctgaagtggatgttccagacatctaggtttggagcgtcttcatcttcgttcagcgccatcatgaggctgttgcaaatttcaagacagaagccttgaattcgctctgccggttgctgtttccccgcgttagcaatcgctcgtacttggtaggctcctgcagtcttgacagccgccctggtctctctttcgttggtcattttctccttgaagactgcgtcattgcgaagcctccatagtcgcgctggtgtcacagttgaccagattcgccacaaaatgaagttcctccttgaggagtgggtccgacttgatgtgctggtcttcgtcactttgtaggctgtcgacggtcacgaatgactcgttgaaggagctcttgactattaggtgctcgtccaccgtggcgtgtgtcggcgctttgcgtgatggatagcgaaacggattgtgagcatctagcgaaagactttggcgatctcacacaaactgtgattgcgtcagtgaattgcagacgtaaatcgaaagatgacggtgacataccactgacgtgaacatcacgaatacaaccctacaacactaagcccacgttaacgcacgtgggataaatatatattaatacgagacaacggcgaacaaaatgttactaacgcgccattgagagttatcgagatacatgtaatcgactttaaagttgaccaatcagaattcgtacatatccggacatcgaaaagttgaaagtgaaaattactcatagaaagcggataagactttaatgcgattgcttttaacaagagctttcggataatgtacgctaagcaaattttgagaaagaattgaagtcactatcgttcaaaacgtggtaggattttgacccttcccaagtggggatagtttttttcaagtgccgacaactcctcgaattttaaacatttcgatgcaaacaagggttcaaaatgtgcacaagacagcgctcttcacgataaagccactaaatcgcgattcgtacttaggttcgtaagtaatgttttgtttgccgccgtctcatacttgtttttttacataaagacataaattcttaaaagaatacgctaaaataaacaacataaaaactttcgttcattgaatgcctttgatgtggtgtcttggatttggatcactccgtgttgtccgtggcagcgagaccatgtaatgccggctagccactgagtttcctcctatttagaataacttaccgctacgcaaaaagtccttctgcaatggtagactcaaagtgggcaggggcgtgtaagtacatccactccacaaactcccagcgtcggatctcgtcgggacatcttctcggcgcatcgacgacgtcatactcggaatgtcgctgagaaatccacgacacaatgcccgactaccgctaattccatggcagcggagatgcatccctcatggcgatgacgatccagccactgaaccatttcaaagtgaccttgttccgccgctttgtccaccgctgctgtagtacacccttcagttctgaatgcgtccaaccattgcacaacttcaaggcggttattccttgcagccgcattcatggcgctgaccgtgcatccttggctacggtgggcgtgaagccattccagtacttgcaagtgtccgtactcagctgcacgatccatcacttcggtagtgcagccctcggaccgattatcatgaagccaaatcaccacatcaaggtgtcaatgagctgcagccatgtccattgcgtcagtagtgcagccttcgtgtcggttggcgtgcagccacttaaccacttcgaggtgtccatttgctgcagcgaggtccatcgcgttgggcgaacagccctcctttctgcttatgtgaagccacttgactagctcgaggtttccatttccggctgcggagtccatggcgacgttcgtgcagccagcagtagggcggtgtttgtgcaaccactgaaccacctcgagatggttgttaattgcagcaccgtccatcgcaaccgtcgtgcagtcttccgatgaattttcgtggagccatttgacgatatcaatgtagccgtttcgtgcggccaagtcaatgacctgcccaggaggagatccttccagctgatgatcactagccgagcgccgccgctacgcggcggtagttatgtggttagttgcagtagatagggccgcccacctccccttcgctccggtggccttttatcagttcaaatgatatttatttccgattgtgtgcgtgtaaaaatgtttttatgcttagtgtagtcgtggatggtatcagccaaaataactattcccatgccagcgttactatgagtagatggatgttgcagggtaaaatattctctattgtacggccctatcttgtacgggaaagccgtgtccaactcgtcgcaactatttaacccgaactacaaagtattcgcacggttcatatctaacaatccgtgtttactgtgaatgtagtagaaataaacatgagcaatatatcatggcagggtagatcgatttggtgttgctatctttagtgtgctcacgtatatgtacatatttgttgttcagtttatcatcgtaccatagttctctgttattcagtttgtatacatttacattttgcattgggctataagccccagcgacaatcaaagtgttgacttcgcttttccccgacttaacatataataactgttcgtgttcttatttaaaatatcatgcttcatcgtttcagcactgtgtatgatccgtcaaatgtagctgcgggctaactattacgtggtctgcttcaaaagtcatatatttagacgtggctatcagtttattctcgtagatacatgtattctgacattcactgagcggaaggttttttatcatagtttacgctgagattccttcaataaccatgttattgggcggatatacatgtaggaaacggaattagtatagtgtaaacgtgaattttatagttacgcggtgcaaggttgttacttttaatatcttagttactgtaaatgctaaaatgctaatgttcgctgcatagcagaaccccactaacgcattatcctaccgctgcacactgtactttagtaaatacgaaacgcgcttaagcgaatattcccccacgatgaacgcagagtgccactgtagctataatatatccaccgctaaagtattacagtaaaagtatactgcgcatgttagtaataaatctccttccgctacatgtatcgcttactgcacacggctatgaactacaataaaacctccactccaatgcatgtctaagcatctactatccccataacccattatcttaccgctactcagcaccgctgcagctataatatatccgtccctaaagtattacacaaaaactaacctgaaactattaatcaatcgtcttcagctactgtacctctcgctacatgtactcgcactgctatcgcttattacgtcggtgctatcgccttctatgcgcttctatcgcttactatacgctgctatcatttactatcatttactatgcactgttatcgcaaagtatccgttgcaatcgttttctacgtgctgctatcgctaactatacgttcatatcgctgactacccgctgctatagctaactatgcgctgctatggcttacaatgtgcttatgtttaaccaagttcggtaaattaaaattatactatgtagtagggcaagcccagctatcgctgccactatgcactactcgcagtgctattatatgtttaagcggactctgctatcgctgctactacgcggtgaacccattttaattaatagcaggtgttccgataagtattatattaggccaagcgtcacggcggaggtgacgtaatcgcccccgttccgctcgcctcgtcggctcgctgcactactcgccgtgttattagtacatacttgtagggcgggccctgtgggctagaacgcacgcgggtgccgcgctcggcagcaaatcggaattagtggggtggagttttagccaataggaattcacgtgatctacggacaacgacactctgattgattcttaggatacaacagttttacgatgtcgagatgcccccatgcaactgccgaagcaaaagctcggtcgggacaacactccacgttgctctcgtagaataatggacaatttccaggcgtccattttgcgcagcttcaatgtcagcaccattaagtcgacaacgatttggatggtggagcaacaaccactctaaaacgtcgaagtatccaccggtagttgcccgatacagatttatctggagagtggcctctcatcatcgccgcttacatcacgatcaggatgactcatgatccacttcaccacttcgtgatgtccgctatcgacggcttcgtgaacggcttttcggggattcactacagtcgacagtgtcacgggcttctgcaggagctcgtgagcacattgatgagcctgtcactgttcagaggaacactgccggaaattactaaagtaccagtgtagccgttgagagtagtgggtgcatgtttaagataggctagcagaagatacttaggaggaatgtttcagttttcagtgaggtacattgttgtcacttaacattgttcgctaacgacatcctatgaccttctcggcgatcgtctccatccactcgccctgcaaccaatcgtagtgactgctgtctccgaggcactttagctaggttatagcgtgaaggccgcgagctccgaggagttcttatcgtgatttctctccagccaatgccccacatcacggtgggcatgggcatagacgtcgtcccatctcgagcttgagccaagtactcgttggggccggtcttggatgctgtggcgggagtccatcgccatattggtgagtgtatccgccattttgttgtactctcgcgcgtggtgctgccacgttaacacgctcagtttgtccgctattcttcgacaaaacagcccgtggagatgctttgctcgcggcggtgtcctggttcgctgctgtcggatgattatgttgctgtctcctgcaacatgcagtggtgtccagttatgccgtagacaagcacgaagtcccgtgaggagtcccatgttctcggccaggttgtttgtggtggtctttgcggcgtaagacatgctgtcgacccagcaaacttcgtgaccagcaatcttgtcgccaacgcggacgatcacagccccacagccaccaggacccgggttgccgcgggattcaccatcaaagaagaggatatatcgggttttcccatttggagcaattcgcggcgaccacctccaggcggatgccaacatcggccgcatatacttaggaggaatggccgctgggcattccgcaatctgaaaagaaggaatcaagtcgacttctgctccggccaagcagacgtgggcaaaccacacgggtgacctcgggaggggatctcgggcacctcgacagctctacaagtaccgtaactctacaaatacagatttcgtgtatcaagagcctcaacaaacagcttcctttgcctaagtgctaccaactctcatcttccgcctcgcacatgagcaggaatattgcgacatagtagaatttggtgccgatgcaagtcagaaacacagcgcggaggatgctgaggagcgacaccgcgccggtgcggcagcagctggatggtgatcgccgcagcgccgaataccaacggatcgacaggctggaaaccagactggaccagacgcatgatgactcagcactaacatcaatgcgacaatcaacaacatgagcaccgtacttcgtaccgatatcgctgctttgaatgacacggtggccaatctggtgcaagggatgactaacctaacgcaagggctgacgcaagtgaggcaagtcgctctcgacgcacagcgcttagctcaagcagcaagccagacaccttgtgaagctcagagtgcccagagcatggcgagtacgaccccgccactggcgcagagtgctggtgcaggaaatatagcggctggagtgacgggcagaggatgtgggggtgctcaggcgcagcatttacgcaaaatggacgtgaagtctcccattttcgtcggagagatcgatgggatcaagctgaatagcttcgcattccaattcgagtcgtattttcgccagaagggattcggtatttccatcaagcgaagcgaggtggaaattaagttttcctgcacaagaggagaaagccacgttgccacaactggagcccagtcatggttcgcgctcagctgcatccagtttagcgacccgctcgtgctggagagctccatggctatgattagagtagactgtccgataagcggttttcacccgggggtccgaggaaccttcggttctgagagcccagcggtttttgctccgccacatcgcacagagtagttatagataggtagtcgttcttgatcgcctcggccggccagttgcgctttcacctgctcggacacaagcggcattccgaaggccaagacaccagcgctgcggctcgaccaatcacccgcgcttcgattcgacactccatcgtcaacggccattagcctctcgcctttatttggtgggagggggctgctcgaagccaatgcccgccaccgacgaagcgccgaactcagtattcaagcatctaacgcagataagtaccattgcatggtatttcgtcacccgtgatgtgcgtttagtataccgtgtcgacagagcccactcgactgttgacctctcccttcatgccccgtctacttcagcaacgagcattcagccaactactcgcccatgctgcagtgttgcgctcagcatgccgatctctctgtggtgtagtagcacccacaaaatcgtcagatgtggcaccctagctacaaacacaacaacagctgagctagtcggcccttgttggcctgcgctgagatgtcccccagcggttcggcccttccgagacagtgatgtcttgtcctcgccgagacccagtaccccaagccagtcaatcacggaagccagctgagttacctgactccggaattagaaatcccgtgccctccgccaaaggacggacgacggccctcgcgggtttttacgggtcgccgagagcaaaggcttctcgactcagcaatcagtgcccgggacgtacgggaacaccggctcgcagcggtggccagacttttccttcgcgcttggcgagacacgcgcccaacccgggccgaccttaatctcttggcgctaccagtcaacaccatacaagctatgcctctcgggtgctgacagcagacataatccggcccgtgcaggggcttactggaagcgcgtgcacgtgttgtggacctagaaaattctgctctgttgtttgttatctctgtcgggcgccctgaaggggcgcctccactattcctaagcttctatacaaataccaaatgaagtgggcggttttggatctcggccgactcttcacctagctcggcgacgcttgagctccgctaagccggataacctgtccggataaccccttgaactcggctgagccggatacggcgtgtctggataacctggcgaactcggctgagccggataaggtgctggataacccagtgaactcggcggagcgacccgcgaactcggcggggcgactcgtgaactcggcagagcgacccgtgaactcgactgcgcaactcccggactcaattgagcctggttaccgtatcggacggtacatggtaccatttagcctgagctcggcggcttgaaccccccatgatctcggctgagcgtgtccagtgcgttcctgaactcggctgggtcttcatcactgggtctgccacgtgtcaccaggtcggggccggtgtgccttgagtttctgacaccatcagccgagttcagcggtccatcagcgcattcttgcccgctgagctcggcggacggtcatcccgccgagtagaacttggctcctggtacgttgttccactgcggccttggagtgagacacaaaacttgatgttccctacaccacacaacaaagccgaccagctcggctattgttgtgtttgtagccaagttaccacaactgacgattttgtgtgtactgctataccacaggggtctttcgtcaccctggttccgagctcgaaccgtagtccgtcgcggatctggtttcggtctggcggcatgagcctccgcagtaaatttagcgtgagcaggatttgggtttctgatgcgcatttgggtcggctctccactctcggcgtccggacattcaaatttacgatgccctgtttcatgacaaagaaaacaggcaccctccgctctgtccttctgtcgctgcgaggctatatcactcgtcagtctcttcctcttttacatttgttggcctgagtcggttgcgtggtcatgtgctactcgcttcttccccacaaagcttgagttcacgccacctccgcgaccttctctcttggtggtgggatctccgttgaacttcttctgctctcgctccagggcggcattccgttcaagagttataatcatggccctagcaccaagcggcgtggtcatttgatcactgccaagaagagtgagagtgtgcaactcctggtaatactcaaactgtgacattgagcgcaccaaaatgtcaaccatccaggcatcaccaacatctgcgtccagtgcggccagttgctcccgtagcgatagcacgtatgatagatggttttccacgtcagcgccgtaccgacacgatgcattctcgagtttctgtcggagagtccgctgggtatacaacttcgtcgtggcattttcacgtccttcaaatcgcttggacaagtagccccacatctcttggaattgaacctcattacttggtgagccagcgtgcacgagagggaacttgatatgagcttggccaacagagtattctgtctcttaaagcgggccttctgttcgttagtccagttctcctgcatctcttgcgttccatcgcagatagtatccagagggaaatcgttctccttgacctctacgcatgtcagatagagcatcatctgtcgtatgtagagaggccagtcacggccattccagttgaccggacggccgtccttgttccacgcaacgtctggctccttcaacttgctctccatccgcgcttctgcagcccacgtagttgggctaataaccctatttcaatctgtctcggaggtttcagcaactactaacctcagctcaactcagtcgtgttacttcgatactgcttggaactttttgtcttctgagctcttaagcctaatgcattctcctcctcgtccgacctcgtcgcactcgccccgtaacagcaaccaacattgtcaacgagcaacttgcagtcacgcacgtgggaaagcgcacagctttccaacacccagtggagacgaaatcactgcgagacagagctccacgtgtatctacctcgcggagatctgtagctcttacagcttcgttacatgtaggtagccgcgctgggaccatcggtctccttgcacgttgactcgactactgtatcgttcccgcgcatccttgaagttaggcccggatatcttcccgctttacgagagctgattggtggaatcgtaatttacaggtccagtgggactccacacgttcactaaaacaatacatcgccataagtgtggtacaattcgggaaacatgctttctcaaaaagtataaggttctacctgttcgctgagcaagcagattactgtacaacaacgcgagcgatgcatgcacatctgtacatgctgttcggcttgctttcttttctttcatggaataaacgaacccttgcttctttcagctgtccgctttttctctgtcgtaggtgtctcctgtatgaaatgcagtatctgtatggtatttcgtggccctggtgtcctcagtgaggccttagagctcacacactgtgtatgctaaagcaacgcagagcgagtgtattaatagggaattagaattatgaattattagaatcactttttgtaacaggggtggaaactgttgatgatgctgatctttgaaatacagcaccaagtgctgtggaaaaaatgattgcgattgtaatattgccgagattgtcaatcacattaattaattgctccgtgatctcaatcggcaatcccgttcccacattgttcctatactgattttgagcctttgccagcgatccggtagatgaatatgcaacggcaagcctatggaaccgatcctagctcctaaaaagccattatgtgtcttctgctgcttcgaaatgcggatatgaggggtcattggatgcctggatggggtgcacgctcaacatgatgaatataagacccaacattgcatttggccaaggttcttgaagctcaacacaaatgtaatcgcacaagcaaaggtcttagagcgatagcgccgccgaaccagtaaaaatatgaacgtagcagaggaaatacaagcgagaacttagattgcaataattgattgttccagatctgagccgtcaatcaatcctaagaatcctaaacattaattggagcaagacgccgtccgtaacggaatatcacctgaattacgattgactaaaaatgctgccgagcgtgcggctccgccgccgaaggcgaccccaccataggatattgcggggccgcaggaaccgtcccggcctctgtaatactaacctgacattgagagtagtgcagcgagccgacgaggcgagcgcaacgggtcctactgccctagcgaagcgtaggcagcctgctcttatagcgcagcgagcattgcgagcgaagcgccgactaacaaaaaatcacccccgcgtagcggcggcgctcggctagtaaacaatctatatttccacagccctgtcagcacctacagaaaacaattatatttggcaggctttcgtgtagctccgggatagtacacgtacacgtacaggtaataatattatattataatacactgaatgaaatatggtacaatacgtcccaaccgcggtagggttacaagcaactgttcttcgggtgcggattgctgaaggcagcggtgtaggcaccccgcctggagctcgtaaacccaggacacaccaagtcgggttcacaggtataccggcaaagtgtagtgagttgaagtccacacagaacgttaagtggaacaccaaagcttcgccaacgtatactatgataatggtgcttctggtctgctttaccctcgacagtaaattttggactgagcactgtaaagcttctacaggctcaactgcttttacggcccgatcatgtcttgcctgccgggttggggtaccaggaagagtgtaacggggttacacggaggttacccttttggttacccttttggtgtgcgatacaccaagggttactccctgggccactggccagtcattgagaatgaactagagttagttatgtcgatagtaagtgcaggtatttgcaccgtagacggcggagccgcagataagagaatgaatacagtttgccttttgcaagaagtctctgacttgttttcgtgggtccttggataggaccctgttggactctttgagtcgtaaattcttcctctacgcaaggagctacggcagccccgctgcacttggtagcactcgtagtcactccctcacctgagtctgttagactgtacctctgtgaggatggagcaagctgcgttcgcgaatttggcccccggccagcaggaggcgcttaaaaagcttatgtctctgttgggcccggagggcgtggcgcaccttgcctcgcaaggcccggacgcgatcaacgcgcgtctcgaggcgttctcaagttacgagaatgctctgttggagcacatccagcagaggatgagcgcgacggcgcctgcagcggcgtcggccgcgtcgcaagccggatcgactcgacccaagccactgatgctgagtgtgaagtcgttcgagggtctggagggggagaatctcctgctctggatccgcgagatcgaaatggccatgggctctgccctgcttcaatcggagcaccagcgcgtcgcgcttgccatctctaagctcagcggaagagctcgtgagtgggcgcttaccagcgggtcgtcggtagaccgagccttcccgacatgggatgagctgaagtgacagctctcacgagtgttctcgccgccgaaccacgcataccgcgtgcggtccaagttcctggcttgccgtcaggggaaaaaggacttggtggactacgtccaggagctacgcacgctcatcgccggcatgttcgctgaaccgctgcctgagtctgtcaccgtcacggtgtttatggatggtctcaggaccggagtggctcgcacggaagtgttccgaagtcgtcctacctcgttcgaggaagctgtggccgtggcgttgaacgccgagcacaatatcaagtccgctcgcgtcgactggagcgcgccacaggcgagtacgtcgagcggtcctgaacctatggacctcagctacgctgaaagtgacgaagtcgagcttcgggccgctgagcagcgccgcggtatccgccgttgctacacctgcggcagcaccgagcacttgcggccgggttgcccgctgcgcaaacagcaatctggttgttcgagcggccccgctttgagccacaaggctggttcgtcgcggggaaacggcgactcccagtaggcgcggggcggcctactggggaagaactaggttctgtagtgcctcagggaggaggaggacaacggagtctagtcccgaagagagacgtactctcaaacacggaacgtaaatgcaagccgggcttgctggtcgtcattgcgactgtgaagggcttcgagaagccgtggacgatcttgattgattcgggggcgtctggcaattacgccaggcgttcctccatggagggcagcgagttatatgctgtggcgcttcgcgcgcgttctcgtgacatagtcactgtccgtttggcgacgggcactcgtgtcacggtgcccaaggtccccatatacttgggcgtcaagttccttgactttgacagcacggaacgctgtttggtcttggacctggattcaaggtatgacctcatccttggcatggcgtggctggaacgccatgagccttggatcgactggaggtcgaaaacattaggtgctacgcacttctctcctggtggggctttggcgagtcatgaacccacctctgccaggacacagaagcgcttttggcgcgagcactggaccgagtcggtcgctgtgctgtacatcggcgtgtccgagttggtcgacaacgccgttgttggagaagcacttcccggagtgggcgcaatttcgtatacgtcggccggtcccgagcaccgctcgtcggacgtttgtggggcggcacgtactccgctggttcaggggcgtttaacgcctggcgacggtctcggagttcggctcccctcgtgcgcgtgggatggcacgtactccatcgactttggggcgttcgacgctcggcgacggtttgtcgcggcccgttgggcatggccctgcgggggacaaggcggagcgtgtctcgcctggtgctttcatgaccaaggattgccgttttggcgattcctcgctggcgtccacgatggacggaggcgcgttgtcgcctggatgtggtgacgacgctgccgccacgtcgccctcattctctcggcctcgggcgcggaggaggaggaggaagagacgcagagcgtctgcggcgtcgagcgtgtcgagcgatgaagctccacgcgagtgctgcgagcagctatacacgctggtgaatgggctgacgggagacgtcaatggtgacatcagccttgaagctcttccctccgtgagtgctctcctcgagcttgaggagatgtctgtcgccgagtttggcgaggccttaaaggcgggcgatctagccgaagtggtcatgatacgaccagaagaagagttaaactcgtcgtcactattggacgaagcggtcctggaggacactaagcaggcgcttaataaacgtagtggctcagccatcttgaaggatccgtcagatccgttgtacccgttggtagtggagttcggagacgttgtctcgaaggacccgcctatgggcctacctcctgatcgaggcgttcgtcatgaaattgacttggttccgggaaccaaatattgcgtcacacgccagtggccacttcccaaggaacagtgtgacgtcattgacgccttctttcgtgccaagaacgaggcaggactggtgcgcgaaagcaagtccccgcactcggcgacgacattctgtgtcaggaagccgaacggcaagtggcgcattgtgcatgctttcaacaagcttaacgcggccactatcccggcacaaacgccgatacctcgcaaggatgttcttcagtacaacatggttgggtgcacgttgtacagcgctctcgacttggtcgatggctactatcagctgctcatgagagcgagtgatatccctctcactgcggtgagtactccgagcggcatgctctgggagtggttggttatgccccaagggctgtcaaacgcaccggcaacgcctaatcgtcttgtgatgcagttgtttcggccgcatcgcgcatatgcgcagacgtactttgacgacatcttcgttcacagtcgtgcggagcacgggaagtcggatatggagaaccacatcgaccatttgagagccgtgctcgagtgtatgcgagcgaacaagctctacgccaatgccgacaagtgcatcttcggcgctgaagaaattccctttctgggatgcttcattgggaagcatggtctccgagcggaccctgccaaggtcaaggccattgtggactggccggttcctgcgaacccgaaagacttgcgcaagtggctgggtctggcaaactatttgcacaagtacagcgagaattatgctgagttggcacagccattgtctaaccttcacaagaaggatgctgaatggtgttgggatgccgagcagcaaagcgcttttgaagcagttaaggaaaacctgcttcaggcaccgatactggcactgccagaccccgatcggccgttcagcgtcgtgtgtgacgcgtccgattttgccattggctgtgcactgcttcaagcagacgccgatgggcgtgagcgggtcattgcgttcgagtctcggcagctaaaggctgctgagaagaactatcctgtccatgacaaggagctactcgcgatgaagtatgccctcgtcaagttcagggttcatctgctcggttccaagccgtttgtgatcttcacagaccacgcgtccttacgcactgcgacacagtcgcctcacctctcgcagaggatggcccgttggctctcgttctttgcggagtacaacttcgaggtgaagtataagcccggtcggcagaatgcgctggccgacgcgttgtcacgcaggcctgattacgagctcgctcacgtcacgagtgtgacttcgtcgatcactgacatgatccgtgtcgcgtatgcacgtgatgagagttgtgtagctttgctacggacgctggggagcgcggagattcgagactcggacatcaagttgtctgcgcggttgcgggcgcgattgcatcgctactccctggatggagatctgctgtattacagcactggatcggatgacacgccccgcgtcgtcgttcctcacgacgaggaccttaagtatcgtatcctctatgaggctcatgacgctcccttgagcggccaccttggtcgcgaaaagacctacagctctgtgagccgccactactggtggcccaagctgtacatgtgggttaagacgtacgtgagtacctgtgagtcgtgtcaacgggtgaaaccctccccacattcggcggcgccgttggcaagtttgcgtgtcccgtccgggtgttggcagtccatgagcctggactttgtgtttggcttaccgaaggattcggcaggcaacacgggagttgtggtctttgttgaccgtctcagtaagatcgttcatctggcggcggtgccggacaccattgacgggtctggtacagcggagctgtttatcgaccgcgtatttcggcagcatgggctgcctgagcctattgtctcggatcaagatcctcgtttcacggggaagttctggacgtccgtctttcaggtgcttggcactcgtttggatatgtccacggcggatcacccccagaccgatggtcaaactgagcgcgcgaaccgcgtcgtcgaagacgttcttcgcagtgtctgtgcggagacgcctaagtgctggagcgcgatgctccctctcgttgagttcacgttgaacaatgcggtgcatgcctcgacaggcttcactccgttctacgtgaacgggcttactcaccctcgcgtcccgttgacgccgtcacgtagtgactctgggcttggtaggggagagttagccgataggcttgctgatgtcagccctcgtgatgttcgtaaggaactggacgacttcttgtcgatccgtctgaatgtcttaaggcatgtgcgagacgcaatggctgatagccaagacgttcaaaaggaacaagctgacgctagaggccggggtagtatggaaaactttgaggtcggagacgtggtgttattaaacgcgaaaaacctacctacacatgcagtttctgcggtcttcaagactaagctgcgtcctcgcttcatcggaccgtttaaggtcgtggccaagaagggccttgcgtacacgcttaaccttcccaagaagatgcgcacacacccagtgttttacgtgggcttgctcaagcgttaccgcgatccgagccaggtgagcgcggaggcgctggcgccggcaccgttggaggggcagcgccccgctgcagctgcaccagcacgtcaacctgcccgcgcaggatctggacttggtcgtgcagcgtctgaacaaagcgctccaaccgacccatccggtcatccggtggatcttcaagatcgtggagccgacgctcaacagcgcggagcgcgtcgtcgttctgcgcaaactgcctcccgacccagtcgcggtggtcgcgcccacgcccggcttgatattccagctcggacaactgcgctcgcacagccacagggtttagcggcggctcgccgacctcctgctctgctcgatgagcacggagagcttcacttccatgtggagcggcttctgaagcgacgtcgtcaccggggtcatacccaatatctggtgaagtggcggggcgagccagtacgaggtgcccctgaggcaagattgcccggacgccgttgacgcttttgatcggtagcacccgagacgctcaccgagctcgaagccaactcgtcggtcgcctcgcgcttcccggcgctagaacgagacgatgacacatccgagcgagtgctcgagtgcgaagcgtgagctggcgccgcaggcgtggacgtagacgcacggcgcggagtatctccaaccgcacgattggcgccttgggcgcgtggtcttcgaccatggcgattttgttggcgggccttcttcttcgcccacatgaagcggaggcgccgttcaagaagaacatcttgctttctatagcttgctcgaagagcatcaattgacggcaacttacgggaattctcaacccaggcctggaactggccatcatcttcatcttcggtctcaccgggaacgaggaccatcgggatgcgctgcatctgaggcaccgactggtcgtgcagttgaccatccagccgggcgcaatactccgagggagtggtctgctgcggcgtcagatagcgctggcgcagcgcgaggcgctcgtctacatctgccgttgtcgaggctctcggccctacgatgtatgaacccagtaggcctttggcccagtcgttcgcgaccttcaatggatcttcgctgcttgtaaagccatagtctctccgagaggggttcacgataggcaacgcctccggtatgttcgagcgcgttggcgcggtgcgctcttcgagctgacggcgccgagcctggtccagtgggttggagactgtgtctggatccgtcggatcatccccgtccctcggaggcagaggtggcgcatggcgcagcgggtccgggtgtaagtgcgacccccgggtctctgaccttggctgatgaacgagtgccgcgggggcgagcgcgaacgcgctgtccttgaagggctgtgcccactccgcggcgatctgccatcgccttccgacgggttggcgttgacctcgcccacctcagacccgaagagatcgtcgtacgcattccgcacacgccttggcgcctgctcgccagccgggcttgagctatgctccgacatcttcgctggcggcagcttcggagggtgcgctgcacgatacttggctatggaaagcctctgcggggtgctgagcacgggctcctcctttgcgctcggcgtctgggacgactcggcggctggctcgacggatgggctgtgccctggctgcgtggcgctcgtgcgcgggccttgtgactgctggtctgtagacccgggggctgcgtgcatgcgttacacgcacagccgatccgacaatgaggctctgtgagcacaagtcgaactcgcggtgggtctggaccctaactggaagatcggaatggtccgtgcttttgaagctggcgtgttcaccgtcttgatgggggagagtgtaacggggttacacagaggttacccttttggttacccttttggtgtgcgatacaccaagggttactccctgggccactggccagtcattgagaatgaactagagttagttatgtgcaggtatttgcaccgtagacggcggagccgcagataagagaatgaatacagtttgccttttgcaagaagtctctgacttgttttcgtgggtccttggataggaccctgttggactctttgagtcgtaaagtcttcctctacgcaaggagctacggcagccccgctgcaaagaggatggaaacctgcgatgctttttcatgaattgaaggggtgtggtaaacccaccacactataaaaggcaaagtttgagcacgttgtttatctgtctgatgcgctagacaaaacgctagtctgcggattttgcagcagtatgcaggattttggggtttccactacagtttgttggcaacggaagaacaaaatgaagttggattataaattaataaacaatcaggacgaaatacaaaccgaaacgaactgtaaacgaacaataactacagtatcatagttcatttgttatctattgacggaattgttaagtcacctgctcaatcgaacgtcactccaacacagtaaccacatccaggatctccaactaagtgcctactcgactctttaggtatgctgccggctccgtctgcatcgatttcttaatatccaaagtggaggcaacgctgctacagtaacaacgtcgactttttaacgttgaaacacgtaggcaaagtggtagtgacgtgtggatatgctcgctggaatctgaaaatccgaaaatcttcttttaccttcttatatccttgaaaaaaaacaaatctaatttttgatcggctttcttttaccattgattcactgtcgagccattgcgatttcgagaagagccatacagtttatgttcacataattttgctaacaccaaagttgaggtttattgtatagtgtatcaacaagtcgcagggctttagaaatcaatatcacgacacgattgagcacccacccggtgcgaccgacatggaaccatgcttcactgtaaacctgcgcaatatcaaaccctacctatggaggttctgacattgacatgacccagttaagaaaatttggctgtgcagtttactatggtagtgattttgctgctttggccaacatgaaattggcgaaaagcgacgattgtttgcgccgatttgaagggtgtaattttcttcggcgccaacggtcgtcgcttttcactaatttcatggagggtgcagtgaatcatgtgtacagagaacgagaagtattacatgtaatagtatcagaaatgcacacttctacggaaaacgccgtgcaaatctaccgctttgtatgagattattaatgcattgaccggtgaatttgaatgtcacgtatacaaaatttaaatgaaactgcccatagtggagccatttaaacgaaacatttgtaccgcacaattgatacacattgcgaaactcagctctaactacacaaagtacttcgactaagcggtaaatctacctcgataaaagctgtagtacccgtcaatgctgatgctgtcaacatgaattacgaccaattgcgctgggctcagcgattcacgcgccgatgtggagcaatacccagggcaatgccgagggcaacggcgagtggattacgaggtgagccccaatctcaacagagcaggacgccatagcacaacgacaacacaatactaaattttacgtgcaacatgaagagcagaacacacaaagctgcaatatcacgtccaccgtaacgaggcaaactcagtgacaacacgtctcgttgtgaggtactgcgtagtatgcagtagaggaagtagtgagaaacttcagaagtgtagtaactagcggtatgatgaatttggcctaaaaccaagcaaacatcgactggtaggcttttgagcttgaccaaggaagagaaacctaatgactaaacccacattgccagctctgacgtggtgtcctctcgtttttgtctcggaagcgacccgtcatcgtgaatgcttacactgaaaaacgcattcccgccggaactcttctgcgagtgctacattctacacgacacgagaagaaccatcgtaagaagcgtggactcaaacccttgcaattttcgcttctacatgtcgagcagggatctggctgactcagtgctgtacaggatactgcaaatctaaacgaccgcttcaacctggtgctcaatttcagtgcaatggacactgtgtcccactccaaagtgtcccaaagccggtatgacatccgatagaaaaatgcctccacctccacctctatccttgttcttgaaggcgctgttggctgctgtaccagcgccgcaaaacgcactgcagcgcattgcatgcagtgagctcgaccttgaagcgagtcgcaccccccccccccccaaaaaaaaaaaagtcaacaaccagcccgagttaacccaccaccagatgccagtcaaacgaatttggacactttgggcacttttgccagagggtggaacatagtcgaagggacagtacccaaaccatctgccataaaacctctgctaaatccgcgattttatcggtgtcccatacaaactcccttcaacaacctccagctaatccactgcctccatttgcgacatcccgccccactcggattacgccatctgcccaattccctcgcccatttacccatttccaggaaaatcaaccaacgcaactcgaccgaccggccatcgcatcactaccgaaagcgcccccgtccgcaacgtcagcccctgagcatggccaagttctgcgctgagtgcggcgccaagagcacgggcggcaagttctgctccgagtgcggcacgcgctacaccgacgacgacggcgcggcctccgcctccgctgccccctccgcctccttcgtcgcccccgccgcctaccaaggcgccgccacagccgtagccagcgccttccgcagcgagaactcgccctacggaggcaactcgtaccagcacgacccgcgcggcagcttcaactcgcagccgcctcctccgccccccgtggcgcagtacgcgcagcaggcgcagccctacgtgcgcaagtcggtgcccagcgccttccgcaacagcttcaaccgcagcagcagcaacagcagctccagcgccaactcgccccccgccgccatccccgtggccgccgtgtccgaccccgtcccacccgcagccactggagctgaggcgcagcagtactacgacaagtgcgtgaccaccatccgcgcctcgaaaggaggcaacaacgagcgcggcgtcaaggagttcaagcagaactgccgccgctacggactgcgcgagatggacgtgcagtccttctacgcgtcgctggtggcggagctcggagctgaagggacgaggagcttcgtccccacgctggcgagactcgtgcccgatgacgacagacgcaaggagctcgtggactacaacgcgcagcagcgagcagcggcgttcggaggcagcggtggaagaccgtcagcgttctccaacaggtgagagatcacaggcttttatttactatcgtactattttactgatgggtttgtgtggatgaaggagcaggaactcgagcatggcggactcgttccgcagcgactcgactatgagcgccaacaacggggcgcagagcaaggggatcctgaacaaccgctacgccgaccaccccaactgcgacgtgtgcaacgtgcgcttcgacgtaaccaagcgccgacaccaatggtgcggagctctcggtcgttgtagaagaagtgacttgtctttttgtaggttactgacgcgtctgaattggtgctgttaattgggaatatgtagccgtatgtgcgggcttttcatctgcagctcgtgctctcccgtgcgactgctggttccgcccggaaagcagattgacggagccaagaattacgacccgtcagtcccacagcgcgtgtgcatccagtgcgccccagagcttcacccacttcaagatgagttggtggctacctacgcgcagtcacagaccgacaacatccacgaggcccgcggccggttccacgtgccgttctccagctcgctgaacaaggagtgctgcaacgcggcggacatcatcggcaacttcttccgtaatgactggggcgcgtccgccgaccgttccatccccgttgcgttcttgcagaaggcacatggtcttgcagttatgactgtgctcaaggctggtttccttgtctcaggcaagatcggcacgggtctggttgtggccaagcttccagacggatcgtggtcagctccatcggctattggcaccttcggactcagcggcgggtttgagctcggaggagaactggtggaggtcatgattatcctcgggtcagagggagcggtcaaggtgttccacaagcctcaggtgaacctcggcgctggactggatgtggccgttggcccgtacggtcgatcagcgcaagcagctgccgccgccagcacgagtgggctcaacgccaactacagctattcgcagagcaagggactgtttgccggcatttccctgcagggagccatcctggctgcgcgttcggacctgaaccggaagttctacggacgtgacttgcagcccagcgaactgctcagtggatttgtggagcagccagcagcggcgcgtccattgtacgaggcgatcgacaatgcgatgcgaggaatcgaggaccacaaggaagagcaacagcgccgctcgtccgtaatgggggcgtgcagactctgcaactgccctatgttccaggcccacacgacccagatctggaacaagaagtgcaaaacgtgcaaccacgctcattaaggagtcgatggggtgtgtgaccctaatataatccatgcgtatgagaggccattgcgttatgtgaacaaaagaaaagcttccattcaaattttggatatttctgtccgtcaatatccataggaccccatgaaaatggaactcgcccacattgctccagtaactggagtccagtctgggcacgatctcaagaccgtgaaaacaaaacaaaaaacactacagtacatgtattacactccacgacaaaaagatatggacaccaccaaaagtggctgtaacttcgtcattttttatcgttttaaggtgcggtttggactagagttgcagaacacgctgataaagatctgcacgctgctaacacgcgcgcttttgcgcttcttcatgtagctcacatacaaatcactgattctgcccaggtgacaaaactaaggacagctaatccccatacaaaatcctatattaaccaaaaccccttacaaatgatacgacttggactttgtatggatgatatatggctcagtattgaggtatagtgaagacaagtccaagtcgtatcatttgtaaggggttttggtttatattggattttgtatggggattagctgtccataagttttgtcacctgggcagaatcagtgatttgtatgtgagctacatgaagaagcgcaaaagcgcgcgtgttagcagcgtgcagatctttatcagcgtgttctgcaactctagtccaaaccgcaccttaaaacaataaaaaatgacgaagttacagccacttttggtggtgtccatacctttttgtcgtggagtgtagccgaccaactccctcatgaacctcgtaaactagagatcgtgcccaagtttacgatcttaaacttgatcttaagagtgttagccctacctaggtaggtcttgaccttagccgtaatcttggacacgatctcaagcttacgaacttcatgagagggtggctgctagcctaggaacttcgtcgctaacggtgttttttttggcaatcggcttgcacgcatgtgggtagtaccgcattccttttgtcaaggcatacagccccatttagccagtattttcgaatcgggaagctttgtgtgcatggaagcatttatatcacacatcatcatttgtacttgacttgacatttgtatgaaatcgacttccttataccaaaatgttgtgccgactcagttaaccaggacacgaaaatcgccacctatatcaccgaatcaggctgtgtgcctcgacaaaaggaattcggtattgcaatatgaaaaagtgctcgacataactgggcgttggtgaatgaagtggaccgtaggtaggtgctcatactaaacgggtgatatctgggctcgtcgacaacaacgcattcaaagacataacgttactactacagtagtacctgtactattttaattgaaagctacacctgtaaaatctcgtacggatataccacagtttcacggagtagctccatgagtgagctgatgttgtggctcagggacagcgtgcagcaggttatggtacgcacatgaacactgcaaggaatacgcagcctgctgcggcatgctctgacctctttttccaacatgaagttctacaccatcgcacagagcttcacctcgaaacaatctgcagagcggaaggctatccgttgtctgtgtggtggcggtggcgtctgtgtgtagttctgttttggctcgtgcaaagcacgaattttttaagattaaaatctcagatgtgttgtacgtactagtactaagtattgcgtagtaatcacatgcacacgatgaccaaggtttttactcctgtaataggagcaaaactcgccaagcactggacaatccgctggacttcagcgcgcgccaacttgagcctacagcaaagcttattagtgccacagcgctgtcgttgtggcccttcaattctgccttctcttgaagggagactatcgtcctaacaatacatacatatgtagagagcatttcggagccacgtacagtcaaagcagtgcctgtactgcatgggacatattttgtcacggcattggttgagaccgttatcaattcctatgttccagatggagattcgttttcggatatggcggaacagagaatatcattccttcagaagtcgattaacagtttgtgtatcatgagcatggttttattgtttgctagaggcgtaggttagtgataagaggtgcagcctctattgtgcctttcacttattctgccgtgataattctggcataactctaatcccttatcgaccttaattatgtcccgagttagctaattcccatgttaattccgggtcgtccctccgtggccgaattaggagcggcgatggtgaggccgagttaaggcggaataagctaatccagcctttgttaggcggaaacagagcgattggcggtttcctacctgccaatccatgccattctgctcgtatctccgtcgattggctctcaaatgctgattgcgggtgttaggggaagcgctcacaatcttaggcagaattagcactaaataagcgttgatcgccctattatgactctaattacgcctgaatctacagctcacccgccaaaatacgtgaaaggcacaattctttcacatgtgattagttgtgcatgattatttgatgtgggcggatgataggatagatagtcaaccgagtaatacatacgtagattatgcaccttccaaacactctccgaagtcagcaggcttcagttcagtccgcaatttgcccgccagcccacaagcccaagcatgcgcgtgggctacaaaactctacttttcgcagttgcggtcttggtaaacgctgatgcgtcgttgggacataatggcgccgcaatcaaccccaagttccaggtgctcccacgttcatacaatgtgaaacagaacgcagtacccacctcaagaatcctgggggtgttccgcgccgaagacgaagagagaataggagttcccacctccgtcgtcgagcaagccaaatccattgtgactaccgtttcgacggaaaaactcgcgaaatggctcaacaaaggagaaatccatcgacgacgtcttcatcatccgaatgcagctacccaagacaggtgataagctgttcgataacccgcagttcatcgcttggcttaattacgcggacgatttaacttcaaagaccggaaaagagacttcagccatcgcgacgctgacgctcactacggtgacgaagcgctaacaaagattctgctagcagcgaagaaggtcgaggagacagtggggattgctacaaggctggaaacggcgcagatacagaggtggctggctgagggtaacactgctgactcgtgtttaagctgctcaagctggacaaagcaggagacgaccttctcacgagtcctctgcttaacactttgaacacgtagctgcagctcttcaacaaggagaaacctgcacaaaagacgacattgtacgcaacgctaacagcccaccacagcgacgacgctctggctcggatgattcttgcggccaagaacacgggaagcaaatcggaaatccttaagagagtcgaggcgacgcagctccagacgtggctcggtaaaaccccagacgatgtattcaagctgctgaaactggacgactcattggacgatgtattgaccagccccctccttaacacttataccaactatctgaagatcttcaacaaggaaaacccttcaaaggaagcaacgctgatcgcggtgctaacgagccacttcggcgatgaagctgtagccaagatgcatgatgcagcgaagaaggcggaggcgaccaagagtaccgccacaaatctggagaccgcccagatccagcattggttgagcagcagcaggaaacttccggatagcgtcttcaagctgctgaaccttgacaagaccggggacaagtttctcactagcccgctgtacacgacgttcaccaagtttacggacgcataccacgccaagaatttggcctcaaaaatgacaacgggctggatcgtacgcgctcactataaggacttcgacgggtgcggcttacttgttatacaaaaacggatggaaaacatacatagcttaggtgagatgcaatccgctactattcgcggggttatgtgcgattaagaaaccggatagaaatagatggagccatgtgaagtgcttccctaagtgtactgggggttgcacccagggttcggcaaaacccatgttttgagatttgtccgggtgggtttgataagaccagtgggtgggtgggtttaggttttgttttttaggacccgatgacgtcgtggttccttatcgggaaccgggctagctgagaccgtcctcgatactgtttccttaataaaatcctgtcaaacactctaaaccgcggtttgccgtggctcgctctccatttctcacgcaaatttgcatgctagcgctctctccaagccttaactataccgtgtcaagtcctaaggacagaaagagcgggcaagccgttggctttgtaggctcagttttcaatttgaacacttccatcacctctcccgcccaagcccctcccctcgacatgagtttctcgtcgcccattcgtctgcaggcggagcacgtcgatacgccggtacgtggcgacgctggcgctcttgcaaggcgcgcagtgccgccgggaacaccgggtgacggcacatagggcacgtcgcgcgaatcccgcgcaagtcgatgtgttcattaatgcacgtacggcaaaagacgttgccacaccgcccgcagttccttggttcaaccacggacccccagcatatggggcacctgttgtcttgctggccttgttcgcccacgtgctggtcacggcttcctggtctgagacttgaggagccgtctgttgaagaggtggttggagttgattgcgccccgttgtgaatgcctgatgttcaggctgagcatccggctgcgcgacacgctgcggctcttgttgctgttctacgcgtctttcgcgacgacgctggctgcgtaggcctcggcgtatggctgcacccaggtcgggaaactggcgggcgaagcagatgggggtcccaatgtgacgtctgagggacgccgcatgtcgaaagggggccatgcaccgggggaagatgaacaccatttaggaaatgaagtatgtaggctgtcttgaagacgcgtcgaggtaagtcctcgtttcttaggaccccttaaatagtcttcagtgctcattctatttaaaatcccaaattacccgccattttgattcaacgggtgggcgggtgttttgaaaaacccaaaaccccaaaacctttatcccacttttcgaaccctggttgcacccccagacccccgcataaagaaaactaactccgagtgtgcggcaacaggtcggttcgctggaatgcttgtcgctgggcccgcctccgcaaataccgcgcgaccctgcttcgcgggcactccgcgcgggtttgctgcggctacgctcctcgcaaccgctcactaccgtttctaagcaccatgtactcgtttctatttatagtagcgaaaggcattgtagcgaaaggcatccgatttttagcggagtagcggattccatcctttttagtaacagaaataagcttaatccgacttcgacgtggtcaagatgattcttgcagcagagaaggtccaaagctctgccgctgctgcgaagcgaatggaagctgtgctcttcaaggactggatggctgccccaacgcgcccgatcatgctttcgacatgctaaagctcaagcgggtgtggacagtaaggctgttcaaggaccccatgttcctctactggatgaagttcatggacgacttcaacaaagggtgagtactacacaacaaaattccagcggaatggggccaattccagcggaatttgcattgcagcggaatggccgatccgctggcgcgtactgcatgcaattctagctgaaattcgagcatattccagcggatttcatccgcccgaattcatggcgcttttgcaaagacattttttcgttaagagagtgggtggactccattcacaagcgcgtctctgtggctgcccgcggcataccgcttgcggaggcaatggcgaagacagcgaagaggagtgacgtggcacgacgacggagttatggaatggaagctgtcgccgctgtggtaggaaggcagcccatcattcaggccgacattctcacagatagcttgggccaagtcctgtagtaagcagggcacacgagtttgtcccctccacaactcaatatacgtttgcttctgatgcacgctctgtttacaatatttgacagtgtaaaaaagcgatccgctggacagcatcatcgcgcacagcaacacaaaacagtggattgttcgttccagcgggtggctcggttccagtggccgacgttttattcaagcggaactacagtacgcacccaaagctttccccggcaagaatgttcaacgtacgctgttggcaacgacttacaataatcgatgggattggagagcggttcaaggcgcgaagaagaacccgagcaccaaggaattggctaccaagttagagactgagatgctcaagcagttcatcttcgctgagaagcagccgatcgtcgtggccaagttgaggaatgtgaaggagaagaccgacgcgaactggaagctctggaagttgtacctgaaggacttcaagttgaagtcttcaacaagtatcacctgatggagaaaacgacgtagatcaaccgctagcatcgcttcggccacgccacatcggagcgtttgagccaacgacccggaaagagtgtagataccactgggaatagagatttaggccttttcgaaacttttgcaccagaatacatcttgtccaaaccccaaaataaacggcctcgaacattctactcgccctctcattggccgcctcgtcgaatattctggagtccgtcctcatgattggctcctctcccccaacattcaagatacttctccctcttcaactctgttcatgcgtgtcagtcggcaaattgccttcaagcgctcaagaccaacactctcgaatcaatgctcgcgctgtcccgcgccaccctgcgcccgacgccgcgctcgctgcagctcgcgcgccgcggcctggcgtccatgggccagtcgcagccgtggatcaacccggagaacgtgccgcagggcgagagcctcaagaagttcggccgcgacctgacggagatcgccaaggccggcgccctggaccccgtgatcgggcgcgaggacgccatccgccgcgccacgcagatcctgtcgcgccgcaccaagaacaacccgatcctgatcggcgagccgggcgtgggcaagacggcggtggctgagggcctggcgcagcgcatcgcgctcggcgaggtgcccgacagcctgaaagacaagaaggtggtggcgctggacctggcggcgctcgtggccggcgccaagttccgcggcgagttcgaggagcggctcaaggccgtgctcaaggacgtggacgacagccagggcaaggtcattctctttatcgacgagctgcacacgctcgtgggcgccggaggcaacgaaggctccacggacgcggccaatatgttgaagccggcgctggcccgcggcgcgctgcactgcatgggcgccacgacgctggacgagtacaggaagtacattgagagggacgcggcgctggccagacgcttccagcccgtgatcatctcggagccgagtgtggaagacacggtgacgattctgagagggctgaaggagaagtacgaggtgcaccacggcgtcaggatcgctgacagcgcgctcgtggcggccgccacgctggccaacaggtacctgacggagcgcaagatgccggacaaagccattgacctaatggatgaggccgcgtcgcgtctgaggctgcagcaggagagcaaacctgaacctattgaaaagctggacagggagatcatcctgcgacgcattgagattgaagcgctacgcaaggaaacggacgcggcgtccaagaagcgcatggctgcattggaggaggaagtgaagaaggcgtccgaggagctgcgggcgttgatggacgagtggaacgcggagaagcacaagcttgaggagatgcagcaagccaagcgcaagttggaggaggcgcgccgagatttggtggcggcacagaacactggcaactacgcgaaggctggagaattgatgcactcggttatcccgaagctggaggctgaggtggcgcatgaagagcaggaggaggaggagttgaaaaagtcgacgaagaagagcagaacgtcgctgggagatgcggtgacgtctgaccacgtcgctgaggttgtggcgcagaccactggcatcccggcctcgactctgatggaaggtgagaaacagcgactgcttaagatggaggaccacctcaacctgcatgtgatcggtcaggaagaggcggtgaaggctgtaagcaactgcgtgcgtcttgcgcgtgcaggacttcacgcgcacaaccgcccgctgggtgtgtttatgttcttgggtcctactggtgtcggtaagacggagttgaccaagtcgttgtcggagttcctgttccagaccccacaagcccttacccgcattgacatgtccgagtacatggagaaatacaacgtcagtcgtctgatcggcgccgccccgggctacattggctacgaggaaggaggacagcttacagaagctgtacgccgccgcccctaccaggtcgttctcttcgacgagtttgagaaggcgcatcgcgacgtgagcaacattttgctgcaggtgctggatgaaggccgtctgaccgactcacaaggtcgcgtggtggacttccgcaacacggtgatcattctgacaagcaacctgggctccgatatcctggctggactacccgaaggctcgccgagttccgtggcggagggcgaagtgttgaacgtcgtgcgctctcactacgcgcctgagttcctcaaccgtattgacgagcttgtgctgttcaaccgcctgaagagagaggatatccgctcgatcgtggacctgcagctgcgccaggtagacgagctgctggaggagaaggaattgacgatgaaggtggagcctgaggcggaggactggctggcggacgctggatatagcccactctacggagcgcgtccgctgaagcgtctcattcagcaacaggtgctgaaccccatggctgtcaagctgcttgatggttccgttgctgccggccagtccattgtcgtgaaggcgaacccggcatacgacgaggaactcgtgaagaacgcaaagactgccaagcctttgctgatttcggttgagtgagctgatactgcgatctctttcgtgtagagtactcatggccagtagcagccagtaaataaaagtaaatgcaatttggcgcatacacgaaggctgcattgtgaatctaacatgtcggtgcgaaaagttcttcatccctacaccaggaaatccttatatggtggtgcggacgtggtaatggttcgctgagcagccattggagcagtaaccatacaaacgcgtttacaacagtactcacaatgggtccgtgtcttgtgaaaatcgctaacatggtagcggagtacactagtcaaacaacatgaagagcacacattccctgttgcctcgctatactttttcaatacccacacaaccgaaaatatttataagacgcataaatatcggaagaacaacgttacagtagcagatcacgtgccaaacgcaacttggtgagctgcagaagaacgatccgatcacctcatgctaagttaacgtaagagccacgatataatccttgagatttggccgagcggtctacagtacatgtatacactgtagtctacagtagacaattctgcatgtggttgcagctcgtctacaaatgctgctatgcgaattatacgacatgacatgcttgctaaatcaagcttaataccgatagtagaccttcttcaccttccgaaggagcagcatccgggtacgctgaaagcgtcgctctcttctcatgctctcgtggtctggtatcccatgggccaatagtaaggacggatatcgttcttgaaacttgcagggtgcatcactgtctgtgtatgcgcgatagcgtgcttcagtcaagtactgaagtcagcgaagcgattgcaaccgagagacgggtcgcaatcgcccctggtacagcttttgagcccccttgaccccaacgtgaaaatattgcggcactacaaattaatgaacactttgaagagtaccagacccttgagctagatcagcgatgcgcggatgcaaatcaatgcatacatggattgtagcagctttaactattctatgcgaagttgccgcgcatgggccgtccttattttcgagtacatttcgcggactttcgagtaaagagtactatactcggactttcgagtacatatacctcttttgaactcgtgcgttgcgttagcttccagctactgactccgctctaagaacgttgaatgtcggcatggcattcacgaacgtaaataacgtgctattagccctttagggcaacttgtctgatgttttctgctggataaagtttaaattctcaactggcttccttacatccgcataagtggttcgatgcgttactcccccagatacattcatgccgtgtcttccttcggtctcatccagggtggcaatgccggacgtggcgcctttcctaagtcaagaataaggtttatgtgaaattactcggaagtcagtgaagtgtactcgcgattaagtagcacccgccgcgcatcgtgcattgcttggtaatgtaatatactaagtaaagataattagcactacatatactttatgcagacattgcattcgtgtcaagaaaaccagcagcagcaatacgaagtgagcgaagcacagtgccgtacgcatactgtaacagagaatgatatctccacggtaatataaaatctagtattaacaggatcccgctaagaagggaacaaaatgagcccaaaacggtgaaagtcggaaaaaaaactaattgcggttttactgaagcttgcatgcaactggtatcgttcgccagttcgctatctcaaactaaacactatgctaatctaatgtaagctatctgtgctatctggcgaccacaggcgctacaccaacgcgcctcgagtgattgccgtgtgctctgtgaaccgattttcaaaaaatcgaaacacggttcaagagcggggcagcttcccccccaccttccctcccaccaggttgatcgcgaagtcggccatcctgcctacgtccttggacagcagtgacttcacgtccgtgttagcgcccatcgggctgatcacgtcgatcagcacccttaagggcctgcaacgctctcttaccttagctatgtaacgctgctgcgcagctcgcccttcatcctccgccagggttcccagtagggtaattgtgggttgggcaaccccggggttacccacccacccaccccggcctacgaattcttgggttatgggttaattctaaaaacgtatattgaagtgcaatatatacgatcaaattgtgccgtaaattataaggtaaaggtttggagatcggttatcacgggttttgtgttgtagaacgtccaaatggggttaggtaaactaaaacccataacccacccacctcgcttggaaaacccgggtaactttgaaccctgtcctccgctcgccgagctccgtttgatttatgaggggggaggtccaaacccagtattggtaccatgtaccaaattgaaatgtctacaaatccgtaatctctacaaatgacttcaaacagagttactaccagggcgcttgctacatgcactgcattgccaaagcaagatagagcacctcaatgcgttaaaacccgactaattccgcattatgtgtttttctgtgttcccctcaaaatgtgttccctcttagcgggaccttctgttaaaaaatcatgcaccttgacttaaacttcgcttgttgggtattgtaagtggctattgtataagactaccgtgtaccgacttttatcggcgctacaggtggtctagaggcaaagctttggtctgggaggacagtgaagacttcctttgtgtgcctaaatttataaacgtagggtaggcaagaattatgtaacatgaaagttggtggcaagttttaaaaccctggtgtaccgcctttaaaaaaatggcgaagttgccacgcaaaagacacgaaagaacttaaaggcgctcaaccagctaaagctgtccttccagtaaaagtggccttctatttgacattaatactgggaggacagctttagctggctgaacagcctaacaaattttatttcagccccctcctccaacgttaattggcaagtgtcgcctgagtccatagtccacagactatagctaccgtaacatcacaaagtttgtacatttcgtggctggttgttccgcgaatgtcgaccgtatccgtggtgtgtaccacacacgtagtgtgaacagttcatcaatttatggaatttattcggaaaatcataacaaggatagcttcattttctcgttttaagctaacatttactcaaaatcattgaaataacaactaacggattgcactctttcctgcgtctgtaaattgactaaaccccatgaatccttcttgtgtaaatttgtatagctggatcaacgtgctcggccgggggcaaagcccccggccgagcgcgcctttaagttctttcgtgtcttttgcgcggcaacttcgccattttttaaaggcgctacaccagggtttgaaactgtcaccaaacttcacgtttgtaaatttaggcgcacaaaggaagtctacactgccctcccagaccaaagcttcgcctctatttcactgatctatattattgtactttgcaatgattttggcaatatggggcgaaatttgctgtatttataacgaccacctgctagatttacgagaaatcgaggtgcataaatgggtggaggcctataattacgctaaaagcgccacaactgcacttttgaaagtgcaattggggctgtgaagcagcaattctgacggcccttatctacaagcacctagacacacggatattatgcataagagggtgggggtgctgggatcatgaacgttggtgtactatggcacttgactggctcctccaagtcgatatatgtatgaggagaggttctctccgagaggatttatgcatcattttagcaggtcgtgtatcgttttttcacacacatttaggagcacgctttgccacatttagcgtctaaagtggtcggtgaaatacttgcaaagcacaataatcctgctatttatcggcgctacataatagctgcccaaattttgtggtgccatttcattggtacacttccggattagaatcctccccttagactggaatggaggcaccctcgggaaccttgaatgaggcactcggtgttttttctgcacacattgccagatctagagcatgagagtgcgcttgcccggcagtctttccggatttgggagactctcgcatgacttgatcgcctgttgcagcctgcaacttgcaggagagtcttggcgcgctaggctctgaccaatcttgggatcggttttgccgcacaaaaactgcgactccaaacaggagacctccgctatctatagttcagtatgccaagtgagcgggactcggtgcattttgaaggatcaggtgcttgcctctccagcacctgctccgttcctcaaacagttcaagtttttgcagcagatttgctgttcgtagaatcgtttcttttggtttggtatcagtcagtcactttccattttgctcagctggcctcagttatatcgcctcacgcgtgaatactgcacacagctccgctccacgatgcgtgtccactacatcgcgctgctggtcgctgcccccctcgctagaaccgacgccgcgtctgctgccacagaatccaagatggccacacccgacttccgtgcagcgggtcgatcgatcgccacggaccagcgcccccagagactgttgaggagccacaagacgatcgagaaagccgatgacgagaaggaggagagagtgtttagcatcaagttcttagacgattttttggagaacaaccagctcaagggctggctcaaggattccgtgtcggcgagagacgccatcaaactaacgaagctcgacgacgcaggggcgaatctgttcacgagcacccaatggaagaccttttccacctacgtgaccatggccgataagagcaacgcggaccaggagatggcaaccgcactgatgggacactatggtccagacaaattggtggataaactggcggccgcggcgaaagtcccggagacgaaagaaatcgccacaaagctggacgacggtctcattaagttctggaagggcttggacacggaaccgaacaatcttttcacgattctcaagctggaaaacaaggcggacgacctgtttgatagcccggccattgatacgtgggtgaagtacctcaaggtttacaacgagaagcaccccaacaaaccggtgtccatgacggaggtggtcggttcacattatggtggtgaaaaggagttcctgacgatgctggcaaaggcagacgacgccaatagtgctggggccaagaagctgcagaacgaggtcattaagagctggatggacgacccctcgcacccgatgaacatcttcaccaagaagcttgggcttgacaaggccggggataaggtgttcagcgacccgttgctggtgacgtacgtccagtacatgaaggcattcaacaaggagtacccgcacaccgagacgacactgatccaggcgctgtcaaagagctacggagagaaactgcctacgatgctggaagcggccaagaaggtgccctctaccgagaaactcgctacaaatctgcaggccgcgcagttcaagcagtggatagcggaaggaaagacaccggatgccgtcttcaaaaaggtgcttaagttggaatcgaccagcagcccggacgctgacatttggcgcgcgtactacaaggcgtacgacgcggaacaccccggaaaactattttctttcaatccctaaaatgtacactgatagagtaaggacaggagtgaaatcctgaattcatcttacaaagtcgagcctccggcccgaagaagctcttaaattgcggttttcaacaaatcttggcgtacttttacagttctcgttaggtatgcgtagcgaaaaagaaagacatcaagcgtagttttctccaactcggacgaaatcttgtaggccgttgtccatccatttgatccccaacggaggtgcgtttggccaaagctattctattaccgtatttatttagttgttgtgggtttagttataatggggtttccaaaaaaggagagggcgaagtctttatcaagaagtttgtatggagtgattgatgaccatgataggaaagtactcattccattttgtaccacccccactataactaaatatggtaggtatgttcggctggccagatcagccttccccgtagcctacgcgaagcgtaggtgtaggaatacaccgcctcacgagtagttctgcccagcagtatcgtgcatcgctgccaaaagcagatgccttacgccgccaccacccaaggtaaattttaggcaccgctcacacacgaaggcgggtcggtcggttggtctgtcgtgtaggaacacgccgattttctagtagatgtaggcacaatcccttaagacaacacccactgagtcacgatgagtagcaataactcagcaggcttgtcgggttaatgaatatgaacctaaaggcccagcttcacacccgttcctcgggttggtcgtttccccttatgttccgtggtttccttaggccaccagcaaaacccagcacttccagtcacgagcgacgactggagtgctcttcacacgcaataaccccgcggtccctccaaaggaagggtcctggccactggtaggccgttcgcgagggtgtcagagaactctccgacggtaagaatcaaaaggggagcacttaagctgcgacacaatacacggtggtaactcgccttcaatacacggcccttcttctactctcttggccttgccggggtaaacgcacaccactatgctagtaggcacgctcaccgacaggcatctccctccctacaagattaccttggacacaggccgtccaccgtgcgcttgaggccttgtcacttgagaggaaaagctgttctgtgttgttgcccaaagggcttatctgttctatcttgtctttcctatagtccaatacaaacactaagtctaagcgtgtccgtttcggatcttctagcaccaacagtccccatcgaagagtcgccgaagactcgtaggtacgcgaacgtaaggtaggtgcgtcttaggtgcgaaactcctgcgacttgagacgtggtgtgcaccacatcttcaactcgggacgtagccatccgcgacggtgctgcgaccttcactcacggccgccgatctcgaactcccgtcaagatggcggggcgtcacggaccgcgcaaccaatcatcgccgatcccgttggtccttggcttttgacgcaatttgctgcaagctgctgctcaggctgcggcgagatctcgggggcaatttccaacaccataggtctgctgggagaattctgaaatgaaaagtgagatatcaagtaaatgagaagtcatgctctatccattacgtcaaaattggtaaaacattgagatcacacgccccatataaaattggggattttgggggtccgaaaatagagttaactctatcgcgaaccgtcttatatttgtatagcatacaattctctttatattttttgcaaatgggcgcaccatgcgcctattgacaaaagggacctactcgaggtattggacctttagtgtgtaagagataggatagtggtatgcggtagttttttgtgtacgatcaaccaaatagacttgacttaagtattggatgatacataaacatgtacattttattagctgttacacaagacggtatgcaaatgtttacgcaaatcacaaaagggcgcaccatgcgccctttgaaagggatttttgttcacccaattttaaaaatgatgccgatgggcgcatcatgcgccccttggtcgcgatagggttaatttttgcagaccggtgtcactcttaacattttagagcgttcgatagataaaaaaaagtacaagacacgcctcttttgattgttgcggataaattgcgattcgtacttgcgtttcgcaagcatcattttgaccttcttccacttatgttttgcatccattttcccttctatttaatgcaagaacggattttaccgaataatactcgggactactattcattggagcctagtgttggcacaaacactaaatgtacttagtattgctaatactagcgtttgcgaattatttgtttaattaacagttagtgcatagtgaatctgccagattcaatctggccaacatgtttgtttatgcttatattatgtgtaactattcatcatcaattctttaacaaaaaagtcgtatgctgccttgaacgcgaaggtcttattctttacaccatctatgatcttctcaaactgcatagcgtatactactttggctgcaccgtggttaatgttcgcacttacccttaccggtaagacttaccccggttaatttacggaaagtaagcgggacctttttttaggttaccggtgattggagttagagataggaataccagaaggctgtggaatagcgacgcgtgtgcccttcaaccctccgtccgagcggtttgctcttccactcctcgttttgcgtcttccagttaagacatcgcagcccaatgtagaacttctcatcaagacatactcatccgaacgactcgacgaccatgcgcgtctgcgtccttggatggaaaacgcgttctttcttggcgaaacggagtacccccgtctaacgcgcattgctactctcattttcactgttccgacctcttttgctgccgctgcgagaatgtcgagctccttttcgtttgtatggttgaagcacctctaccgtttagccacagacaaggtcgagaagcttgtcttcttgtacactaacttttctttgctgaattcagaggacaacactacgtgcggcgcctcgttgagggtgatagcgtaaatgaggaggaggaccacgacagagcaataaggagttggtggactacgtccaagagctgagaactctcattgcagggatgcctgcagacccgttgccagaggcagtcaccgttacggtgttcagggagggccttcgcactggcgttgccaggacggaggtgttccgaacccacccaagctcttttgatgaggttgtgagcgtcgcattgaatgcggaacacactttaagtcgtcgagacttgggtggaatgtgtcttacactagcgcgtcgagtagtccggaacccatggacctcagctacgctgaagacgaagaagccgagcttcgtgctgctgagcagcgtcgcggtatccgcagatgcttcatctgtggtgacgcccgttaacttcgtgctgggtgtccgctgcgccttcagcgcaggcttcgtcaagccgctcatcgagttcgagccagggctctggttcgtctcggggaaacgaggagtcccagtaggcgcggggcgacctactggggaagaactaagttctattgatcctcggcgaggtggaggtcgacaggacttagccccgaagagagccgtactgtctaacatggaacgtgtatgcaagcctggcttgctagttgctcaagcttggggaagggcttcacgaagccatggacgattttgatcgactctggagcgtcgggtaactacgcccggcgttctacgatggacggaagtcagctttatactgaggcgctggtagagtgcgggagtgacatcgtcactgttcgtctcgcgacgggcattcgtgtcacgatgcctaaggtccctgtggacctgggcgtgaagcttttggatttggatagcgtggaacgttgtctggtcttagaccgcgattcgagatatgatctcatccatggtatgtcgtggctggaacgccacccaccttggatcgattggaggtcgaagacccttggtgctacccacttctctcctggcggggcattggcgagtcatgaacctacctctgctaggaagcagaagcgcttctggtacgagcactggaccgagttggtcagtgtgctggatatcggagtttccgagttagtggactctgagtgtagcattccgagcgtggctcgcggacggcaggtggagcggcacgaattccgctgagcgggtgtgcgtctgatggcgacgccctgctgtattcaagtaaaggagcggtcgtcacgatgccgaagaacaagtggcgttgcccggatcaaggatgtggagcggcactaattccgctgagcgggcatgcgactgagggcgacgccctgctgcgtgccagcgacagcgcggtcggcacgatgccgaagcacaagaggctttgcccggatgaagatcgtggggtggcgcgtaatccactgagtggaggccgcggatcgtgcagctcttcactgagtgtcggtaaagacactggagcccccctggagctgaacgaggtggtgacacctggcgtcaagacgcacgcgaaatcatggagctcttcagagcggacggtgtccatgaagaggaggcagcgccgcaaagcgctggctgtgagacgcaaggcatctgcgatctcacgagtcaagaagggcgtgccgagcggtgaggctccacgcgagagcgatcagctctatacactcgtgaatggagtgacgggcgacgtcgacggaggtatcaacgtcgacgacttgccctcactgtctgctctgctggagctggacgaaatgtccttggccgagttcggcgaagccttgaaggctggagacttggctgaggtagtggtcatacgacccgaagaagagttgaactcgtcttcgcttctggatgaagatgtcctggaagacaccaagaaggcgctgaatacgcggagcggatcggcgattctgaaggacaagtcggatcccttgtatcaagtggtaaatgattaccagggcgtagtctcgaaggcccccccctcgggctacctccggatcgaggtgttcgacacgaaatcaatctcgttccgggaacgaagtactgcgtgacgaggcagtggcccttgtcgaaggagcagtgtgacgtcattgacgcgttcttccgtgcgaagcccgtggcgggagtggtgcgtgagagtaagtctccacactctacgccgacgttctgcgtcagaaagccgaatggcaagtggtgtatcgtgcattctttcaacaagctgaatgccgctaccattccggcgcagacgccgatccctcagaaggatgttcttcagaacaacatgacaggatgtacgatgtacagtgcgctcgacttggtcgatgggtattaccaattgctcatgaggacgagcgacattcctctcactgcggtgagtactccgagcggcatgctctgggagtggttggtaatgccccaatggctttcgaacgcgccggcgacgtttaatcgtcttgtgacgcagctcttcaggccccatcgggcgtacgcgcaaacgtacttcgatgacatctttgtccacagtcgtgcggagcacggaaagactgatatggagaaccatgtggagcacctgcgtgctgtgctcgaatgcatgtgtcaaaacaagttgtacgccaacattgacaaatgcatcttcggagcggaagagatccccttcttagggtgcttcattggaaagagtggcccgaggggcgacccggtctaggtcaaggccattgttgactggccggttcccaagaaccagaaggatcttcgcaagtggcttggcctggccaattacttgcacaaatacagcgagaactacgctgagatggctcggccactctccaatctcctgaagaaggatgcggagtggtgttgggacatcgagcatcacgatgcgttcgcggcctttaaggacagtctcctttatgcacctattctggctttggcagaccccgctcgtccgtttagtgtcgtctgggacgcctcggactttgccatcggctgtgcactgctgcaagcagactccgaggggcgcgagcgcgtgatggcgttcgaatctcgccagctgaaggctgcggagaagaactatcctgtccatgacaaagagctacttgcgatgaagtatgcgctcgtcaagttcagggtgcacatgttgggctctcagccgttcgtgatttacacggatcatgcatcgttacgcactgcgacacagtcacctcacctctcgcgaaggatggcccgttggctgtccttcttggcggagtacaacttcgaggtgaagtacaagcctggcaggcagattgtccttgtggacgcgctgtcgcgcaggccggattatgatctgacttcgtcattaccagatttgatccgaacggcttatgccaaggacgacacctgtgtcgcgttgctaaaggctctgaggagcaaggagttttgtggtgtggtaacaccacttaaattctcttctaccaaaaggtattagaggcaccaacaacacgctaacccgcaatggtaagcgcttattggatcaaaacctgaagaccaggaacgatcccttacaccgggtcggttgccagcgcctctgtgcaccttaggttgtcttcggtcaacccaaaaacctgtaccgctagccacgagctaaggctaggatactatgtagcgctttcgcgcaaccccactgcagtccctcagaaaggaagggtaccggcgtgttaggccttatacaggggggccaaggtaaaacctcagtaggtagactaatacactcagggacactctaatcccacaaatatataccgaacgatactctaataccgttcctgcctccccggccacgccaactcttggcgctgccaaggaaactctcggtcaatgcacgataagctccccgacaggcatccacacacagccgagcgtgtccaggcactacaataagctagctacacttaccgaagtcggacttgactcttgttggctttgggggaagactgtctttttattactgagttttccgaggccccggggcctcgttctggtcatcctatgatgaggcatatgtccctatacaaatatctagtgtgaacgatcgcaataaggcgattccggacacatcaaatgacgaccgcggctacactaatatgtgcggccaaagtacgtaactaaatgcatctgtaccaaaacgtaggcaccatgaagcctcggtcggggttgtattaggacccgacgaagctccggccactaaccgtcactctaacgaggataatttcgtcagcttaaccaaagcagccacttccatctcgcacttggctgctccttgattgtaccttgattcttgggcgtcgggcaatcgctcgggtaatctccattttccgataccacaactgccctcgcctcccgtccgtaaactttatagcccatttatcgcgcttgcgcctgaccgctgcgaccgccgctctgctggaccttcagtgttctggtccggtacgctcgacattcttgctgctcttcgccatcagttggatcctcgttaatgacgccagcttgttctccggtatcccagggtgctgtcaatgtagtcaccgacactttgcaacgctggttagggccgcaagatctttcattacccaccggcgcccctgttgacgctgataatacggtaccggcacaaacggcacctgtgatcgcgtctccagtatcttccgtcgctgctgaagcgtcggtcgacacaccacaaggttcctccggtgatattgcatcttctgttgggaccaacgagagtttgatgacgcttggagccgctacggggcgcgcagtaggaatcctgccagatccattccggtcgtcgtatgatccgacgttggtcgtttcatcgacatcaagctgacggctgctcttcgcatcgtgattcctttctcttctgctcccctggcggcttctctagcgggtaaacttaatcggaacgacgtactgtagccggccacactctaagcggaagcccatccatggtcacatcaccggaattccggtggtcgtatggtccgacgttggtcgcttgatcgacatcccgctgactgcccctggcctgccttggctcagtctcctcgacagcattgacgtcttcttttgatagtgctgcatcacctggggctcaaactgagcaacatgccctgccacacttctggccgcaatgcaaaacatccggagttccagtggtcgtatgatccgacgttccatcgacatgctgcggaccgccgttcgacacacctcagtcgcatacttctcggcatcaccggcatctgcagtagctagttctgcgtcggccgagggttcaacgtcaagtgcagtagtcagggaacgtgctatgactcgtcctgcctcacaccatcactacgtcggaacttcggtggtcgtaaagggagaaggaatggttgccccagggtgaagcccgcgaatcgctgcaccgccaacgtcggtcacaccttcacttgcttcgtcatcactcgtagataatgtagctatgtcgaccgtggtttcgttgccttctttccacagttccaccccgattttctggtggtcgtaaccaaatcgggtttagttgcctcagtctgtggctcgggaaccaccgcaccagaaacgtcggtcgcgccttcagctttttcctctttggtgtgagcccgtgccagtgttgaccgtggttcgtggtgcacttacagcaaatagtcggtggtcgtaacgtaaggtctgggtgtcccagcctccaccaagcgacccgctgtgttgcaatcacatctattcaagccgcgccaattctcgtgcagggtccccacagtttccgcgcaggctacagcaggtacactcgccttgaacgagacttagttgtcggccgtagcggtcccagatccactcgtatctccacttcatcatcaaatccatgctcagtcacttgtctgggcgtaaatgcccggggccctgtcacgtcaggagctgcgtctgaagcctcggtcgacctccaatcggcttcatcagcactcgcttcacctcttctcgctggtcgtggctgcctcgtgctgcgtttccactcagcagtatgtccacttcaaggccagggtgattgatttggtccatcgactaagaccggtcttgtgaaaactaagactggtcttattacaaatccgtaagaccggtcttacagatccataagacccgtcttactaaccgataagatcagccttagtgaggcttctgacgcactctcgggggtgtttgagggccccattgctagagtggttgacgtctccatcttgacacctaaccgctctacttcgactgctgcacccaaagcctcggtcgccctcctagtcgcttcatcatcacttgtttcgtctgttgagggtttgaccgatgtttgcttgtgtcgtccgttgttcctggctctattccgatatctccattccatcgcgactcgttcgcttaacacgtaataagcaaattatagtaatttcctccgtctgtcactgcgagctggaaagccctcgtaggcagttcaatcatcatctccagtagcttctttcatctgtcgtcgcgaactgggttaccctcccaacaggtcagtcgtcattagcatgtggaactcgtcaacgacttgggccacgtgcaaacatcgtgctgccctcgccacgcgtgcaggtcatcacccaaacgaacaaacgagcggtgttcatctgcgcataggtacgtcatctcaggtccgtttctcttctaaacctctgtcagcccaccactgagaattagcactcgtgccttggtttacctcgttccatgaagggccaaatccgagtggtaggcatcagtcgagatgtcgacaaagactcctgtgcgtggtcgctgagattaatcccgttcgcggtgtcatcaacctccgggaacccttccgcaaccatcgcaagtacgaccaaggtataaatctcctccagtaatcattcagggtcctctttgtccgggccatcgacacaattttctccatcggtactaacctcggtcgtggctgttcctgcttcagttaaaatgtcgttcggtccaggatcatgttcaccccagtcgatagtggcgttgccccacgcgaccgacgtttgatctggttcagggcgtgctttcgtatcagttgctgttccgtccattcgcggggcgggttccaccgctgctgttacatctggcgcgtcatgatcttctcccgaatcgtcgttcagctctccaacaccatcatcacgcttgtctccggctcctgacacctcggccggggcttcctgtgccccatgttcgatgctatcggcgttatgatcggtgcgcttggatgcataggccgctcggtaaagcgacgacttttccagtgcgtcggagtcggtcggtgcactcgcctcgtcgtccgaaccgtcgatcgatataccatcacgttctttgacgtctgcagcagtctcagtaaccttgaccaagccttgggagaccctggggtcattgtcatgacccgatataccgagcgaagaataatcgtcgttaggacgaccttgaagatgacctctcggccatattggagcgtcgagcggtctccgtacgatcttctgcggcgtcgagtaagtcctgtgctcaatcgcgggtggctgttcggccagccataggtcatagagacatatctcccttccatacagagtctcgtcacggctcgttgagtatgtctgcacctgccactccttgtgtggtacagtaccccgcggaagaagtgggcgcgccgagcgccggaggaagaaggcgccaggacgcgagtgatggacctcgacgcggctgatggaacgcgacgcggattgatgggcgcgacgcagggccgagctcgacgggaaaatcagcgtggatgatgggctgtgagacacagtgccagaatccagtgcgacgcgtaatcatccgacgggtcgaccagcacacccggttctgcaaaacgcgtcgaccctaatccccgccgagcaaaacccgccgaggtaagatcttgattgcgccacgtaaatcaggttgaagcacggtagtgcatgcacgacagaagtagggacaggcacagaacgataggcttagcaagcggtagtacagagtagccagtagcaaggacataggatagggtaagtactcagtcccgacatttctctgaaccacaaagacctccggatctcctcggttccaggggaaccaccaagcgccggcaagtagagccgcctcgatatcgcgaccccccgtcgtttgctggctcgggtgctccccccccccccccacagacccgtgctggaacaaaggcacgttaaacgtataccgtttaggtgggcgcccgataacgcgctgactaggcgaaggagcgcactgtcctgataaccgccgtgcacaagacccccctgtaggcccgataacgccacacaagccccaggaaacgccgcacgcccgacgggaacgccgaggaaacgccggcccgataacgccgcacgcccaaggctcgacgcgacgccctacgacaaggaacaagcgtcaccacaagaacccccccaactccgaagcttgcgaagacttgggtctgtatttcgaagatacgctactccaacaaccgggaataacttgctcggcgcgacagccatccagacgcgccgagtttgtgcgagatcgactccgcgagatttctgcgagggcgctactccacaatggtgccgcgacccgggagtactacttcgaattacgggctaacgatccaagagcaatcggaggcaggtgtgcagtcggctggaaggtcgccgaccgcaagagagcacagtgagagacctgtcgcgtcgtggagctctgagggaaccttcacgacaggtcacggggccagcgacgaccaggagggctacgaagaacagtttgccgttcccgatgtggctcccgacgagggagccgcgaaggaccgcgacttgcgtcgcggtcctaccggttggaagcctgctaaggccgacgaccaacaacaacccaccgccaaggcagccacgaaacgcaagtcacccaagaggaagaagaagctgcacgcgccggactcggcggaggagtcgctgtccaagccgcaaggcaaggccacgggacgtcagtacaccgtcgatgaggtacggtacgtcgtggcgcgcacggagatcttccgtctgctagagcaagacccaatcttggtcttccgcaagcctatgctgatgagcaacttcacaggcctcttcgtggcgccggacttcgacagcctcaccagcgttgcccacgccgcgccgactctcttccagatgctgcgtggctcggggttcgtgttgggagctttcaagatggagaggctgtgcgattgggacctcaagtcttggctgcgcgcaattcgcgtcgtgcaggagcccttgacgattctcgccagatccgtcaaacaagacgcgacgagttccgcgacgggccaagacgcgccgagtccctcggcgggcccagcccagacttcaacgaccacgccctcgcctccacctcgataccaatcgagcgtggactccgacagctgtctcgagtcacccaagcgcatgcccatgaaccgaccgtcgcgcgccatgcagctatccgcacaaatgtgacgaaacccgccgaggaggtgctccccaaggccttgagagattccatcatcaaactgatgcagacgacagtgatgagcaccccacgcgccgaaacagccgcaatcccggtggggccgaagccgcccgtgaatcctgcacccacggtggctcgcccccaggaggcagcgggtgtcgccatggagtcggtcagttcgcgttcttcgacgaggtccagaactcggcgcgacgcggatgaagaccccgacgacctgttcgacttggacatcggagcgccaagaaccgcggccgccgtctcgacggtgacagccggcggcgtaggcctcgctcgcgtacgcctctcagcatcttccgagctgaaagagttctcgggacaggacgctagcgaagagaaagccagactgtggctcaaccttctgaagtccgccgcgcggcgcgacgggaggacgggtgaagaagtgtgagggcagttcagcgatcggatgagcgtccctgcgcgccaatggtatctccatctgcccaggaaggtcaagaaatcatggaccgagctgatggagcaattccgagtgcagtacttcggcaagggcgtgtcaatagccagccgctactaccatgcggctcagcgccccgacgagacccctctggattacttgtaccggctcaacgtcgcgggcttgagggctaacatcccatacgccgaaggcacgactgaagagaagcgcgaacacgtcgagcatttcatccggacgctggacacacaggaggccgaactcgcctcgcgtctcacgctgatggaggtcgccgactctgaggcgctggagaagaagctgcgtgcccgacaacgtggattggctcatcagaagaagactctcttcggctcgaacaagttccccaaaaggcgccgaccccgccgactcagccggcgcgcgccgtgcatgcgattcacgttgcgtcggacgagtacaactcggaacgcgagtgtcgcgacagcgacgatcgccagtacgaccaaggcgaggaggacgaagaacgcgccaagttgttcgtcgcggggcaggtcccgccgggagagccggcgcgtcgcaactttgatcccgacgactcgggacgcgatcgtccgcgttgtcaccactgtggttctcgtcgacatgctgagggagactgctggaagttgttgacgtgtcagaagtgtggtggccagcacccgacggagcgatgcttgagggtgtgcaaggcctgcggtgacacgaagccggagaatgcccgatggaggagttcttcaactaattgcgccagtggtttgacccgaataaacacgcgggaatcctgtcgccggccgccgagaagattttaaactaggacgttcgctggcttggaaaccagtacgagacgagcgacctgtttccgtctatgcatatgtgaccaagaagtcgcgagaggtggttagtgagagcccgacttccctgaatgataatacatgtggatccaacctggaacgtaccacccaagaacgcgggccgcgaatctcggcggtccgacgtacgacggacgacgagtttgcacgtgaaccacccctggacgagatcaacttgcaaccaggagagtgacgcggatactggaaagattacgcgccgcacaagtggtacaagcaggccaagattcatggaaagctgaacaaccgccgtgctgtgttatagctcgacacaggggccgaggtgtccatcctggacaccacctttgctcgtgaggtaggctgcctgatcgacacggagatcacgcaagagtgtgtgggaattcgtgatgagacatatttcacggtgaggagaaccagagtcaagattacctaggctgggaacttggtgtactatatgcacctgtgggtcggcaacttggtcggccaacacgcaaccctgggaatgaacttaatggtgctcgctggagtgcgcatcgacactgcggacggcacggcgtgcctccccgacgaggtgcatatccagataatcggacgaaaaccgctataaggcgcacggatgcacccggtcaacgtcaagacgcctgtgagattcgaaccaggagacacgcatgaagtcttgctgaggctggatcgaaacgcgccgttcgtgtgggtgacacgggcagagtcgtgggtgactgactacctttgtcaaggggagagtcggaaagaagacgtacctacgtgtcacgaacatcggagacgcagcgataaccctcgacgcgcatgaaacgcttgggtggtggacgccgtctgacggccagcctcggaaccgtggattcatccgactgggctcccctcggtaccagcaggggcagaatctgacgtacggcgtgacgcgcgacgctgaggagtactggatcccagccgagctcgacgggccgatgacgaatcgcccctcatacccgacgcctaaagccatcttgcgcccggaaccaaggcaactcggggcgcgacacgccgtggccccagtgttggcagctgtcgcgggagtgccgaagcaaagtagggtagaggtgccgcccgaaaaccacgaacaggatgcgaacgaggagacggttgaagtcgaagacaatgtgctctcggctgtggtcggaggcgctgcgatggaggaatcgccggagtcgaaacccgccgagccggagcccgacgaggcgaaaccagacgagccggaggaagacaacgctatcctcatccacgaggggtccgacctcttcgcagaggatctcgagtccgagatggcagtgctgccagacctctcgctgaccgccgaggtgaagttcgaagacttgaaggttggcatgccgactggactcccgctcgaggaagccgcgagacaagaaacgcggctacgccaaatcatctggaagcggcggaagtggttgatcggcaaggcaacgccttgccgccagccgcactgggggctgtctgcaacatcgacgtgggcgacgcaaagcccgtcgcgcaacgtgtccgaaaaatcccgccgtagttccgagagaaggtgaccgacttgatcaaggggctgctgagcgcgaggatgatccagaagtcgatgtcgccgtggacgtcgcccattgtcgtgatcataaagaagaacagcgtcgatatccggctctgcattgactacaggctcatcaacgggctgacgcagttgatggtttaccccgtgccgctcgtcaacgacttgctcgaagacttggacaagtatctgtggtactgctccctcgacatggcgagcggcttctgggacgtccccatgacagaccgggcccggctcatcttggccttcatcacgccgatgggactgtacgaatggctgcgtatgccgttcggcctgtgcaactcgccgcatatttaccaacgcttgatcgacaacgcgctctacgggttcatgaagctgtccccggatggcagcactcgggacgtctttgaagacggcgaaccggtgaagccaggtattcactccgttcggggatggaggtcgtacatcgacgacatcctcatcgggggcatgtcgtgggacgacctgtgcgagaaggtcgaactcttgctggatgtctgcgagcagtggcacttgtccatcagtgtcgagaagagcgagaagtcctggaggagctggtggtgcaacgaccgcgcctggaccgcatccgagtcgccaaggacaatgaggtctggatcgtcaacctcaagaagtatctccgcggcgacgtcggagacctatctcggcgcgaggtgaagaactgccaaaagcttgcgctttagtacgaagagggcgaaggcgggctccgattgaaatgcggtgacatgcggtgaccgattgaaatgcggtgacatacggggaccgattgaaatgcggtgacaaatcctaaccagacgatgtagagccgagcctgatagagatactgcatctgttggacagaatacaaagccaaacgggcctagggccttggcagcgcaccttggcccaaggcacgctgtcaaggcctactaagaagtgattcaggtgccgaggacaatatcaagtctaaatgaaactctggggttgctaacaggagtggtcatgatgggcgtcacgtgagcgctgcccccttgcgagaggtatccgaccaagatagaggtcaaccctacagggttgagaattgctaagagcttctgataaagggccatcacttgcagcatataatcccaccataacttggcaatttctgtcagactctcttagccactgtttaacacgactcgcgttgtgttgtgtagccgataatacttgtttcgcgactaatgatgcttcagatttattgtacaaaccggaccgaatgtccgcctccgcgaaccccttaatgcgtcccgagtgctaaataaatcatagtcaaaacaacagtattaaaacgggttgagaataataaatctgagtctaaaagcgatttgaatcggctggctgactggcactcctcaagttgccttccgcccaccaactctgcatacaccccatgtattcaacggattacaggtggcgcgtcgtcacgctccactacgtctactctgtcccgtgcgaaatcgtcggacgagtgctcgctgtatctggccgcgcagtgcggagatggtacgcccagttcaagtcaaccggacatgttctggccaagacacccgaagagcgccctgtattcttaccagcggtggccacgtacgtctcggagtacgtaaaggagcacccatgcttctacgtggaggaactgctggaggaagtgaagcgccgttttccggagcagcaaaagggtttgtcgttaacgtgtcttctgcggctgctccgtttcgagctgaagttgtcgcgcaaagtgcttgaacggcgtgcacgagaggcgttgccgtttgaggtggacacgtatctggccaagctgcgatcgttctacagctaccccgagcagcttgtgtttcttgacgaaacatcaaagaacggcttagattctatgcggcgttacgcgtggtctaagaggggtgagaaggcagttacacgcgtgcctttcaagcgcggcagtcgtgtctctattctagctgcatgtgacgtgacggggtttattgtgtgggtgactacgcgcggcacgttttcgcggaagcgcttccatcgcgcgtttgtacgtcaagtcgtccgtcatttgaatccgtggcctttgcccaggtcgatcgttgtgttggataatgcccgcattcacatgtacaaggagctggaggacgtcgtgcactgatgcggagctgttcttttgtacctgccgccgtactgccctcacatcaaccccatcgaggtgatgttcggctggttgaagcaatggttggttaggcacgccaacttggtggctccgctgtaccccgaactggtgttgaaggtggcgatgcggaggtgcttgacgtgcgaagaccacggagcgaacttgtttcgacactgcggatacgcatcgagtggagtgaatgtggcggcgtttactacagattagcaaggggaggcggagcggagggggatggggtgggtgggaggaacgatttaactgagcgtagcgaggcagatttagaggaatatgcattgcttaacagtaaaaagtatatagtctggtcctcgcttagtcgctcttgtgttcgtcgtccgagacgtcttcctcaggctccgcaggtggctcaaatgacgagaagaccccgctggcaagtaaattgtggctcggaagccccaacacgcggcgcagctcagcgacttcgatcgttagcggcatctaattagacccgtttaagcgaaccgagatagtttggtgagtaggctcttccagagcggcttcctgctcgcgcatagtgtggtgtagtgatttggcggtaaacgagaatcgagctgacgaccaagcttcagtggcgacccgagtcgtcgggacatgttcagcaatgttcggcggatgctgattggccattctggaccgattccgaagactcgtcgacacccaagttcgacacccaggacttcaagtacgatccgaacttacagcgaactttgacccgagatccgcacttaagacgaccgttcgagcctcggcgactgctccaagtcttcatcgtccaatagagtcatcgagaggcctcttggggcgtcgaggaggctctgaagggtcggtggttacttgggaagatccaaaacggacgcgtttatactagatatttgtattgaatcataggaaagagaagatagaacagataagccccttgggcaacaagaacagaacagcttttcctcccaaccactcaaggaagacgtccgggctatcggtgagttcccgtagcaattggataaacctgttggtaggattatgactgtcggtggacgcgcctgctagtatcgtagcgtgcgtttacccgtggtcaggccaagagaagagaagaggtggccgtgtatacgaagggcgagtcatcgccgtgtagtggacgagcgagagcgcactccatttatccttcccgccggagtatagctccggcaccctcgtatcaagccgtgactggctggggcccttccttcctgagagcctgcgaggtttatattgtgtgtgagagcgtgccagcctttgctcgtggctagtgacgctggggttccgtcagttgactaagcggaaacacggtgcacagaggaaacatcaacccggtgcaagggaaagttcctgggccttcaggttctaaccctaacaagcccattgattcatcgggacttggtgggtgttgttggtggggaaagtgtgctattatataatttagtgcgtgttcctacacgacgatagcgtctatatgctgggcttgggcaaatgttgccgtctcgggcaccgtgagttcggttccttccggctggcgggcatccgaaaacgaccaatgggttcgggcaatctcaccaacttggaggtcggagcgctgctccaggaagctgtcgatcgttcgtgctgcctctagtatgcgtggggcggtcgcgcgtcgggtcccagctaagttgcttataggttttcgagctgcaagtacaacctctatttcaaacggacctgtattcgtcgtgcgccgctggtagttagaaaaggaagtcgccacgagcgatccaaacgtcccctccgatacagaaacccaatttcgttgaggtgccccctggcttagtttcatgtagatgctggggtcggagcgaatagttttctgcccgtaggaactgaggcttgctgcaacacggtcttcaacctgcttacaaacgtcgctgtggccatgttcgcgctcgtcaaatgagaacacaggcttctcgacagggacattggttcggctcgtcttcgtaatttccccaattttaacagcgacacgcacggaagtcggtatattgaatagtggagttgttagcgcggtgtctggtcgaatgccgatctcaaagtgggcattctgcgttgctgccgtctaaatgaaacccctggtataaacaggcattcctatttaaggccaccaatcagggtacggcgacgctattctgggtgaatcgacctaataagaaaaacccaggctattaaatcagggtataaatcgatcgatttacaattgaaatgggcaaagcagccggttttcacaataccgtttgctgtgtaaaaacctatagattctgctatgtggcgtagtacgttgcctagaggttgaggtgagttaaaaggaggataatagttatacgctttactataattattactagaggagctataaatccttagcaatattagcgataaaaaggctaatagtggagcttatggatattgtgctttgcatccagtttgccctcctatttagagcatctccaccggtgctgagtaaaactaaaagcaaattgccctcagatccatgactacaacggcacaaccgtgctaaagacagtgcgcagctccgccggccattgagactcgcagcgagcgcgttaaagctcttggttctgcgccagcaatggggacggcgagtcctagctgcatagccctataaagatgaaaacgggccccacagcacgttgaggaagacccagggatgacatagcaatggcgacactgcggtctgtgacgcttgcgctgcttcgaacgcttgacttggccctactaccgacatttactcaaccttttactcaaagcctcctccgttggcaaccttgtgcaaaaatttgatcagcgtaaaaaatggagcaatttgctcagcacttactcaaaccggtagagctgcacaaaactaaaactataattaaatattgacagaaaaggggtaaaatttagttttactcacgaccggtggagatgctcttacatgtagttcacaacttagtgtccgtacttactggtaaatcatagaggatttgaatgcaagtcttgcattaccggttcaatctgcccacgcatataaaccttttggagggcccagtgcggcaccgcgaccgtaccggtgtaatgggttttctaccagttcggcttgcccacgcatataaaccttttggagggcccagtgcggcaccggggtcacaccggtttcaggacaatgtaccagttaggtgtcaagaggggtcaccttttgacttgacgtaccacggatataatcctgtttggtctgcgatagcagcactaacgttgcttcctatcccagtataagtcgtacgaattacagtccaaagtgtcaaaaagtctgcaaagcacaataaatacacagctggatcgcaacaatcgattacacatcctgtaaccagtgagggaatgtttcattcgggggcagggcaagtagggcatctttgcaatgtgctttatgtcataattttacttggtggtttgatgagcacgggcccaaaagacaaacacaccagcacctgtcgggcagagctccatgcggccccgcctcccgccgcaagcagctccgcgccgcgccccatcaggaccagtcgctgtgcgactggtgtgtgggaacctgatgttttgcttataccggtaatgcaggagaacggtagagtcgcacagacaagacaggcaaatcccacagacaaaaggctaaacccacagacatacgaggaaacgcacagaaaaacatgtcacctggtgtaaatccacagactttagggggaaaagcacatatcatgaactaatataaggtgggccccaccggattcggccaagctcctaaagtagttcgtttaaactatagcaatgcttgcatgcaatagatgacgaggggtgacgcctgatagctggactggggcgctggctgcggacaatgagtcgataggcatagataatatggaggttaaaaccttaaaaccagtgagaccgtgatacactgagacggacaatctgaaaaccggagcgctggcggtgaccattcaaaatgcggtgacatagtggggaaaagggcgcaggaggtgaccagcgagaacgtggtcccgaagcggaggctgcagggactaaaagcctggacggaagactgtcaataagtttatgaagcatcacactgagctcatgaacatgtactatcagtttaaaggacgaagacacggctgaccggaaacgtgcgcagttaaagtgtgtcgcgatgccagaggatttacacattagtcaggtacgtgactacgcatatcgctggcgagacgctcaccaagattccgcaaagtacgcaggtttccatgtagtgccttctcaaggtcgccatgatgatgcttggccatactaaagtttcagtagtgaattaggatatgtttagcgtaaataacggtacgaatgattagtaccgtaaaattcttgagggaccactacgtaagtacgcacgttcctcaagtccatatggagatcaagttttgggatccgttcacgcagagggtttactctgtatactctacgccatatattacaatcccggctgaccattccgatgactttgggccaaatctcttgaacacaacaactgcgcttaccgctctcgtcccgtccctagtagactccccagtggggatgctcttttctccgtgatccacaaattctctatagatctccccggcaaatcaagaatagcgatgtcgaatgtacctcgcagagctagctagtacagccatgcagttaagatttgcgctttgtggataatatgtgctgaggctagttaaaagtggagggagcatgggaagcaacacgcacctgcaagttgatagttagcaggagtaaaatgaaaggctcaaaatgaactttagataagttattgctgcagcaagatgcggtcatgacggcatgcggcaggggcgtcagtgccttgccctggacgatggggcagcagtctacgcgacgcgatgctccgcgaacaagacaaatcattcactacatgtacaagtacaaacacaagaatatcggcgatattatatcaccgacccccttcaaattgaagtttaatggtaccttcgaccgcgctctgcttgaaaaccgagccgacggtacaagacgaggcgctacttttccattaattgagtaattcagtacattggcacttctgtcaagccctttgcaagtttcgcaacctcgcagtttctattggtccgacttttcttgatttgccggggcagactgtagttcttctgtggtgctgtagaggcagaacagacgcaacccgtacgactcgtcgacctcactttgcttgtcttcacccgcgtgcgactggagttgagaaagagtaacgccgggcaactgatttcatgcggctccaccacgttgtgcttatcgcggttgctgccctcattaacagtgccggggctctctcgtcagctaccgactccgacttggcacttccactcgctggggcgcaagacgttgctgccaacaggctcctgagggcggatggggacgacgaagagagggcgttcaacatcaagaccatccccggcctcgacaagatcaagtccatccctggcgtcgagaagttcgcgggtctgttcaagaccaagatcacccccggaacgctgctgaagtgggccaagaaggggaaatccccagacaaggtcttcaccacgtacaatctggacaagaccggcaccaagctcttcgagagcccggacttcaagatctggtacacgtacacggccctggtcacgaagacggacccggagaaggcgatcctcacgtcactcattggccgctacggcgaggtcactctgtcgtcgatgctggaaggagctctgagactgccaggcatgaaggatgtcgcgactacgctgcagaagaagctaatgcagacgtggaaggatgtggggatgaatgccgacgacgcgttcaagtacctcaagttgcacatgaatgtcgatgacgttctgaccaacccgaacttgaacgcctggactagatacgtggacgacttcacggtgaagaggaaaacggacacccccttgattgatgtgttgagagctaattatgacgacgctgcgctgctcaagatgttcaatgcggcgaagggcaacccgcagtccaagaggatggctaccaacctggaggccgctctggttagcaagctgagactccaaaggatgagggctgaaatgctgaggcacgcggcaggaaactagacttaggaatgcttgacgcggtttgttgaatcgaaacggaccatagtagagcagaaatatatttgctactgtgggcaggagagaatctaagcgtcactgctatgcattcgtttgacgtaatgttcttgtctgctatagataactgtttgtattgtactatgaatatttagttcatctcagctcgctgggagatacgtacctgacaggtaggtcatactccacattcaactgacttagttactcaatgtgaattctcgagctgacgaacgccgaattcggatttgagagcaatcgggcagcatttggagactacactgtacatggtttggacgcaaacaatcaaactcgttggcaggcagcatttacaaacaattgtttgcttcgagggtggctatagactctatagtatagagttcagcgtaaaagaaatcggggtgtcactttaggcgatgctgagaaaccaaataagcaaaccaattttgagaaccactgaagggttaaacgacatgtatgaacaaactcgatcttagcgtctcaaagctgtatcggtgtgctgatgcaagtgcatgtagccaccaccaaccactgacgtttgttactctgtcacctacttcgattaaacaataggcactgctatatattaatttaaacgtgttatggtgttgcttacactgaaaccaacaacttgatcgtttacatttttcgagtggaaagctgtgcacgggacggagtctgtaatacaggtccagcagtagcagggaggcacaggttgcttgtcatcgtcagctgcttgttgtgggttgagggagtcaagtgacagacgcattttaaaccaatcagagtgggtaaataggtgtaacggtattcgtgttcaaatctcttgacggaggctacagccattgctggctggaaattggagagatcaaaatttgttgattgaaaacgtaagatgtccaggttacgggggctttaatttgtctatactggcgatactataattggagattgagctttttgtgtgtttcacaatgcacatcaattttttacccactttttgtagccaaacatgactgtcagtaaagaacggaggatgccggtaaccgttgtcccatcgactgcatgaaaatgcaaactgttcgcacgtaccgtgcatggtatctctttgggatgtgtctggtagtctgaccgactggtgctttacgtatcgtatctgtaagtcccgtgttaccgcaagccgaataaataaagtaccaaggaataaagagtgatccaagttcaccaagaccattatgtcaatcatatagctaagtgttagtcatgtagagcaaagaaggcaggtcgaggctcgagtcggtaacgcaaatcgtagcatcatgaaacgctttcctgcagaaaacgtgttcttctggccccgccctaatacatgtactgtacatcaggttgtgcgtccttttccattcacttttcaattcgctctgaaggcttcatcgactgcttgtatggtaccatgcgtctttactgcgcggctctgattactgccaccgtcttggcgactgccaacgcctcggtgacagataactcaatcgtcaacgccgctgagtacccgaccgttgtccagaacgacgcccctttccagaggttcctgagggccgcgaccgacgaggacgaagagcgggccatcagcttcaactcgatcccgggtgtcggcaaggtcaaaaacatcgtggacaagcagaaggcggcgcaatggctcaagaaagggaaagaggcggacgacgtcttcaccaagatgaagctcaacaaggtgcagggagagaagctcttcgagaacaagaagttcctcgcctgggtcaagtacgtggacgacttcaacgccaagaacccggacaaggcgacgtccatgatcccgacgctgaccaagaacttcggcgacgacgtcgtggcgaggatgatcgaggccgccaccaaggtcgagggcaccaagagactcgcgaccagcttgcagacgcagcagatcaagtactggcagagtctcgacatgtcggtggacgacgtcgtgagagcgctgaagctgaacaacaaggtggacgacgttctcacggaccccaacttcctggtactgaacaagtacctggtggacttcaacacgtggaacccgagcaagtccacgaccatgaccgagacgctcgcgaggacctacggcgacctgcctgtggccaagatgctggcgaccgcgtcgaaggtcgagagtaccaaggacgtggccaagagactgcaggtgcagcagtttgacaactggaagcagatgggactggacagcgacgacatctttaagatgatgcacctggacgagggcgtggccaacatgttctccaacccggcgtttagcgcctgggccaagtacttggacgactttaacgctaacaacccggcaaagaagacgacggtgttcaaggaactgcggcgtcacttctcggacaacacgctctcccagctcattatcgcggctcagaaggtcccgagtacagagaggtttgctactaagctgcagaaccagcacatcagggtctggctggaccggaaggagctcccagacagcgtgtttaagttgcttcagctcgacaagggcttggacggtctgcttacgaacccgcaactgagcgtctgggtcaagtacgcgtcgcagtacaagatggagaacccattcacgacgcaggcgactctgatcggcacgttctcggctcactacagcgaccaagcgcttacgaaaatgctccaagcggcgaagaaggtcccggaaacgaagaaaatggccacggacttggagaaggcgctgctcaacaagttgaggctcatgcgcacgaacagggcgacctaatactaaccatttttggtactgcacaacgctaatgctgtacttatcccggcggactcgatgttcgaaacaaggcggactagtctacactccacgacaaaaagatatggacaccaccaaaagtggctgtaacttcgtcattttttatcgttttaaggtgcggtttggactagagttgcagaacacgctgataacgatctgcacgctgctaacacgcgcgcttttgcgcttcttcaggtagctcacatacaaatcactggttctgcccaggtgacaaaacttatggacagcaaatccccatacaaaatcctatattaaccaaaaccccttacaaatgatacgacttggactttgtatggggcgacaaaggaaccagcctcacggcgatactcgcgacgttagacaaagatctgatggcattatcgtgtactagaaggggtgtttagtaacctgtaataaatgcatcgaccatcgcacaaaactgagcaagtagtaagcgactgaaatttcgagtggtggctaccatgtatcatctgatgatttgcgaggcacgttcagttgcatcctagttagtgccaatttgtagctctgtatgctgctatctgttggatatacgattgtcttcttcattctaaactgttggtcgatgatatatggctcagtactaaggtagagttgaaaaatcatgggttcctttatcgcctatacaaagtccaagtcgtatcatttgtaagggtttttggttaatataggattttgtatggggatttgctgtccataagttttgtcacctgggcagaaccagtgatttgtatgtgagctacctgaagaagcgcaaacgcgcgcgtgttagcagcgtgcagatctttatcagcgtgttctgcaactctagtccaaaccgcaccttaaaacgataaaaaatgacgaagttacagccacttttggtggtgtccatatctttttgtcgtggagtgttgcatatggattgcacataggttaaatctactacagtatttaccgcacttcatcagtagaattcagtgcaagtcgacaaattccttcgtggccaactgctgagcttcaacggtaccgaaccacgccgcctgctgagaacgctacagtatgtacacgtacctacagtagtagttggagggggggtccgctaaggagggccctcatcgggagggccctcgtaatagagtcgacatttgggaaacagccggttgtgacaaacgcacaattggggtattcgtaataggtgcatgtaccgaaatcgtcggcaacgcactgtggaaatgataccgttgccgacgatcatagctctactataaataagcatccgaggcgaagtttactttagactaccagcaaataataagagggattgagtgcttgccattttttcagatctcgttgtgctgatggtgcgccctgctttcccagcgtccgtctacctgcaagtttcccaagcgactattgatgagctctacctagaagcagagtctcggacctacagacctgtgtttcgagaagtaggcggagccgaagatgacatgttcagaagtcaatcgcgagttcagcgcatgacacctccccttcgacgtgtttccgctgcaatccttgaggatgcagctacccgcgactccaactacagaccctgtgtgttttcgtacatgcactcgcgacctgggggtctataccaggaacaacatcaagactatgcagacgaagtgcgagctgctgtgcatacccgctatccgggcacaatagttgcagggatactcaccgcggcgattttgctgctcccgccgagcgatacgatgcgcgagtccatccgggttctgcaggcagaaataccggtgctgccgaattcgggccgaaactcgttcggtgcgaccgcagtattggcatactaatagcgaattagacaccacgtctggtctccaaccaaggtctcgaaaaaacaagtagcaatgaagcctatagttggaagtagtataccccacatcactatgaaataaatcgccacgaaacacaactgcatatccagtagggatctccaattcaatctctatttcagggcgggcaaagtcaaagcagcggggaaacaaccgcagtcttgtcccgggttggatgacaataataacactagccggaatgctgcagccaagtttgtgaggtgcaaagcacgcttcgttctcatattttggctcaacacggttcgacctctagccagaatgtttaagctcaaatacatgttcacttaggtaaatttactttgtttttggcatgcgagtgcgaatgctttttgcttacaaaaaatactacggcttagcagaatattttataagacaaagcgtactatcttggttacgatatgtactttaattaatttgaaacctagaattgttttaaaacacgcagagactactgccacgttctgatgtatacctctatcacttgtgctggaaccactgctagattcttcgcctcggtcgtttttacgaggtaattacctggccgttacatgctataaacatagttgtacccgataagacactagagctggcagggcttcttcgtcttagcacccccagcatcctttcacccgcgttgtcggcaggcactactctaagaacaccaacatctactccgaaacgtgcattactaccacatccagcatccgacgtggtgtcggcagaccaacacactacgaacaacaacacctatccagacgcgagtatcgatgccttaccgccactctgatgctcactacgaggcagcttttgtcggctgcgcagcaagtgagttctcagctagtgtctcggctggagtttcggccggtgtctcggttgatgtcagtgacctgggttttagcgttctgggtaaattcgacgttgatagcgatggagtagccgctagcgtgaacgctgagtcgtaccatgggaattctgacgacgacggagattgggaaagtgatggcgaagacgaagactctgtcatggacttgatacgagaagacttcaacatctccagcgacgtccacgaattcgactttcctgacttcaatttggacgatgatctacctgtcggtgatgaaatagattcggagttggactgggttgacgacaaattgctagctttggtttgtactcatcagcttaatgaggagaaaaagcgtctcgacaactcagcggtggtcgatgcagacgacgtagcgcaaacggagtccggtgagatcggaatgagtgggaccgacctccgtatggtggacgaaatctacattcttccgccaccacctcagcttacgtacgaatcgcacgatgcagctgaggcagcgatacatcagtggacattggagcaccattacaacgtctctcgacgacgggttcggtatttacctggtaccaaaattgtgtgggcgcgcaactatgagtgcgatcgagcagggtggccaaagtgcacgcagcatttggtggatagcgagcgccagcggtccatgcgtggctcgaagcgttgtggatgccccatgcggttaaaaaggtgcgcgggctctaagtctgacatcgagggaccttggaaaattgtacacactcgtgataacagtgaggtacacaatcaccctgcggtagacgatgttcgtgtccacgccgcacaccggcagcgtgctgcagcaggtctatcgcttactcaacagagcatggaggaaactattgttggtcagacagctgccggtgttccagtggccaagattcgagcggccatcctccacagcacccccggttctcttgtgctcccggaagatattggaaacctcaaaatgagggcgaggaagcaggccatggcgacgcagaccccgcttgaagctctttttactctgttgaacaatcacaattttttcttcagatatgagatcaacccagccacaaacaagcttctgtatttgctgtgggcgcatcctgctacacttcgcctgtacaagtttcactgtgatgttctgataatggatggtacgttcaagacaaacaagtacgacctgccactagtgaacgtcatcgcaatgactggaatgaatactgttctgcccgtggcgcagtgtttcttacctggacaaaaagacaatgactacacttggtttttgatgcgatttcgcgaattgattgacgagcatgttatccaacttccatcggtcaatctaaccgatcgtgaattggccgtgatgaatgctcttgactctgtgtttcctgaggttccgtcactagtctgcagatggcatctgaaccagaacgtattggcaaaggttcgcagcgttctcggccaggttcaagtggagaacccccttcctggccaagataagtgggaaaatacttggcagaccgaggtcttcatgtcattcgtctatagggcagtggaagcaagcactgaaagtgactttgaattgcaatgtgtgattttgaaagacttgtctccggttctggcggcctacttggaggctcattggcggaagtacaagactaaaatcgtccggtgttggacgaacaagtacaagcactttgagtatcgtgatacctcagccgtggagggttcccatgcccaatgcaagcgttggctacaggacagcaatggtgaccaccgtatttactcggttactaccatggtggctctcttcagcaagtgctgtaagcattcgtgctgctcgtgatgctacgattctaccgtacctctttcagaacgacagatacactcaagtaggccggattatcacggtgtgggctctgcgagcaactgacgaactctggaaggaggctattcaaatgctgactggagctaaaccgtgccgtggatgcactggtgtatttcggatcgtgaatgggaggccctgtgcgcatgaattgatttcgatcattcagtcaaacggtcggatgaaactacttcctacgatgtgtgatccacactggtggatctaccgcaaccggatggaggcttggcgtccacgcatcctcgaacccgcaagtcttcgcactaaacgcaggaaagcccaatcgcatcgtgccaaccatagggcaagtggtatagcacgagatcccacgcttgcagaaagagttgaccaaaacaatccagcaccagcaccaagttttctgcgagggatgacgagccatctcattaccagttcaagccaaccaagccttcatctccacgcaatcacgaatggcgggatattcccaagtaatgggcttgttcatgtcaccactgcctaccaacaggacggcttcagagtcgacacaagcctggccgggccctaccaaacgtctcacacacatccacacacttggggatacgctaacagacacccgttttaactttaacacgtattctataaagtctacctaacgtgtacaagcacacccacaacgtttagggcagtacgtactacaatcgaagttgtaccactgtaccatacagaagtttcacagatatgcaatttgcagatttgcaccataccttgtactttaaacttttataagggttctagtgcgcaagcatgtaagcgccaacgcataagtatctttctcgtatgtttcacttttaaacatgcaggtagatgtcgtttatattttagatgcagaagtgttacacttgcgcgtgttgcaaaagtgtaacagaaatgcaccttgcagaagtgtaacacttctgcaatgtacaaatatgtaccacttcggtatgatgcacttatgctacacttctgcaatttatgcctttgtaacactgctgatgcattacttattagtaaaattaataaataagcctataaaacatcagaagtgtagcatggtttccgtgttaaccttctcactacaggttacgtgtaagttaacctagctgacggacttcatccgaagtaatagtgtgcggatgacattttgcgtacacaagccctcggctttttcttgactgaagccacgatatttccttcgacccgaaggataccggtcgcatgagcagtagaggccacgtagtcacaggttcgcttttttgagcttgggccgctgcgaggacgaggcgatgagttcacatgcgccgaagatggcgtagtattagcggtcttgtcgctcatgacggccatcgagagggcgggatcagctatcgctccgtcaaaattagggaccgggaccggcaggtctggttcagatgcagaatgcagcgaggaggcagcttcttcatccagctcaggctctgctcccaaattacgagtacaggaagaatccgatccatttaccggcacagcgttgccacccgagtcaagctggctctgccaagcgagagatcccaaatacctagcatatcggggattgaacggtacttggttgtccacagcctccttaaatcttgggttgacgccgctgttgtcggttgtaaagtcgcgcaacgttgccacggcctctcgagccgagtctcgcgtcatttcatgagcttccatcgcttcagagtcactatgcaacaaattatacgatctcgtggcagatacatgagccgccgtatcccgcatcaacacgagtaatttgtctcgtgctcctgccgagaagctgccagccacttgcgcacccaagcactcaataaccgcggcagcagactcagcaacaccatcggcatcacgcttccgaacagccatcgccatagcagccagctgtgccgacatcgcggctcgcgccacagagccacagagctggttgcgctgtcgtagaagcttggccagagcctggtcggccgccgactcgggcgcttgaactggggcgtcgcaggttctaccaacgcgcgagtcagtcgaagtgatagcagcgcgggctcgatgtgggtaacgagcgccatcttggcgctcgtctagcaccccgttgggcgcttcttccagagtgaacgtgtcgtcagcagtgctctgcaagaagctctctctctcttctggcgttagcgctttccacttcgcgcgcaggcccttgccggcgcgattgctgagccatgccttggtgactgcagcctcatgcgcgccgtcgagctcttcttgagcgaaaaccttcgcctgggcagacactccctgcccttgctgtagctggggtgcccaggcgaagaaggcgcggtggacacgcatgagaggtgggagagtgctttatgaaccgagctctcgttttggtacatgtacctattacgaatgacccaaatgtgcgtttgtcacaatcggctgtttcccaaatgtcgactctattacgagggccctcccgatgagggccctccttagcggatcccgttcgaggggcctactcacaacttggcaacaggggggtgtgatcccatccaatgattcatcacgtgtcagttatcacttgaatcatacaaactggaccctcgttcgaacccgtgattcggagtccgtattctgcatcactcagctctaagacgacgcaattcgcactacgtcctgctactggaaatcgccgtcattgcttgtgtcgatgctaaccaagcaacgaacgagctcaagccaacgacggatcgctctctcgctaccgagcataacatctacgagttcccaagggaatatagtgccgacgaaggtgaagacgacgtagaaagggggttcgatgcctacgccatcgagaaaaccaagagtgtcttcacctcctcgaacgttttcaaggaaaaattcaagcagtggcctaacaacaggaagaccctcaataacgtgctcgtgtgtttacagcttcaaaagaccggagaaaagttgtttgccaacccgacaatctccaaggactcttgacttattaggatccatcgatgaatgccagcacgtcttctccttcccgctcagcgactgcaatcgcctgcttttcggcacaaagatgaatttcatgggcatttccgttggcatgttggagacaagacgcttcgtcttcggatccaacagcgcgttatctgccttattcacccagccgttctcgatccaattcgtttgaaaactgtagaaaaaaataagtcgtgcatctttccatccgaataacgactcaattatgcttcctgggatgcagttttctcaaggaatactgcatctacactaagtgagaacaccttgctaaagcgagtccttgatggtattaatcatttcgctttttgaaagtcgcagtgtaacttttcaaaaagtcgctgtcggttgcttgcagattcagaagcttcgagacactcttggggctccaatcttcttccagcagcatcttgcccaacgatttctccaagtacgaggcgagattcttcgtgctcgagacttctttcgcatcttgaatcattctccacactgcctcattacgaaagtggggcgttaagatttcgatcaccgtcgttcgctctgcaggcttcatgaggttgtagtactgcatgtacgcgtgccacgagttgaacagtggttctccaatagattcttcaagctgcgaatttcgagcaccaggtgaaagacctcagctggagatttcccgcttttgaaccacgtttcaaactgctgcttctgcaacttgtaagcaatattttccgtggtcgggaccttcgccgcgtcttcaataagcttggccagtgctttatcgctgtagtatttcttgagtagtggaaccgtcaacttcttctgatgatagcgcttgtccagatcatccacatagttgacccaagtacccaagtacggactcgcgaaaagtctggactttgccttactaagttggagtatttgaaaggcgtcttcagctgatacacgggtgtccagccaagtctggtattcagttttgccgcgatctccttggtcttgggggaaattttggcagcttcgatcatatcgaacagagtaagcttgctgtatcgtgcctccaacaccgagtaagtcgtcatcttcttgtcagggtaaatttgttgaaatcatccacatacgtgacccaagggacccagttggcgttgtcaaaaagatcgtcgtgcatctttgtcttgagtagaatatcgaaaatgtcatcgggtgagcgtcctttttcgcagccaaactcggagctgctcagcttgcaatcgcttgccgatcgcctgtgtgcttggagccagcttcgcctgctcaatcagcttgaccagagctgcgttgtcgtagtgttttaccaaagttgagtagaaggagagttgcttgctggggttcttcttgttgaaatcgtccacgtattggatccacttggagaactgcgagctggtgaccacacgaataacgttatccaccgatgtatcaatcttcagagccttgaacgcttcgtccgcaggatttcccttccccaccagcttcttgactgtttgaggcaatccattcacgaaactctcgaggcccgaggtagtgtatcctcctcttcaccggtgaaagaatcggcttcagctagtgtgtgactccttcttaaattgcgacaccagccagcgatgagacgggatacttggatgcgttaaccactgcaggcaacagcacaacgcttagcagcatcatgcgatggtccattgcttcagtcggtcatggagcagcttggatctgaccactccgaagcaaattgcaaactttcctcaccaagcctccgctcagcacagcacgaaggggacggggaaagcgttgctgatgtgctagaggatctgtcgcgtccgtcaacgcattgggatgtagtgcaggtagccccttccggagcaaagttgttgtggcgagtcgtcgcaccagtgggaagctcaccacggcaacgccgatgaagtatgaaatacactgtggtattgaagatttttgcagttaccttttgcttttgtatcgttgagatgttcccttcaagcaggcgccattcatgatacggtagctgtatctcaatgtcatcttagaatgcgaaactatcgctcttatagatttgctgacgtcgtagactacgactggtagccattttcgaccgagcaacccacaagtccggacgtgcgggttcgcttctttccaaagcgataccgaagcggtgaacgtttacaaaataaaatgcacaagtgtctctgactgcgccatgatcatgtagtctgaaaaagagtaatctctgaaaagtcgaacgacacaactgaagggttgctcgactcgctttgcttcgctgcaaaatacgagattttgccgtttaattcagacgctgctactttcatttctcccgttgtggattccgatagatatgtgtatcaatatcttttctcccatcagcagtttgaaccatctagcgacgtggagggattatcatgggcttgcctccgttcgcattagccccagcgagtcccatatcttccagaaacttatccatgcgcgcggactccttggcctaacaaccgtaattaaaagcatacgttagcacacacacacacacactatagcacccgagtccaagtatcccctgtaccttcagctccgcgagcttttcctgctgctcgtcctgcttgcgacgccgcgccgaatcgcgttgagccatccgacgcttcaagtcatcatcacccgctccacggcctccacccatgagaaaatcttcactgaggtccagtccgtcacgtgcatcctctcggtctcgcgcggcaccgtgcagcttctgccccaactggcgcctcttctcaatctgcgcctctcttcctgtggccttcggcgccagctcctccatgaccgtgtcacggtactcgcgttctcttctccgctcgagtttccgccgcttcctgtctccctccctctcatcctctctatcttcgtccttctccctgcgtttatcacgcttgctcctgccctcctcgtagctcgacggccccttactctccctcgttttgccagagctcagtaaattctcctttctcgtcgccacgccgaccgagtccttggccgtagcgagctcaaacttctccttctcccccagcttagccacgaatccccagcggtgacgagtccgcttggtctgctccacaacagactcgggcagcccctcgtagaacattttggccagcttgccgcggttccacttcttggcgaactcgtcggtgaacagctccatcgcttcgtcggtggacagatcgtccacatatttgcccctgcagacgataataatgacgaaaaagaacgagaacaattagaaggaatattcttctcgtcgtatacaactaagtccatagtgtacgcactttgattgggccagccaaacgcgaaattccgtctgacgcacaaaatagtcctcatcggtgaccttttttgcgcctttcggcaattttgtgtgctctttcccgtggtggctgcttttgtgacttttgtggcgggacgagcggtcgtcctcctccttgcggctactggaccggcggctcgaggacttcctcgagtgcttgcgctccttgtcgcctgtaaggggggtaaatagtcaaagaggacagaggaggggtgagaaggagaagaaggagaacgtgcaaagagaggagggggcagacaaggaacgagacgcacggtgctctcggctcatgattgcgctcttcgcaaatgaaaatgttgcaatggtaacacaaatttcctaattgaaatttgctagaccagctgacattccggtttgatctgtttgttaccaggagacattattaacagtataataataatagtacatgtatcaataccacgattactacagtcgagcagccagattggaaaataatcttcaggttgccgcatgtacagtgccggcaactttttgagaccgattggggagttctcatctctcacttcgccatcgacctcgtagcaccagcaccaagctcccgtcacatcgaagatgcgtgtccagtacctcgtaattgctcttcaattttctttgcaagctctgacgccgcctcgacctcgtcggggcttaagttgagaacccccaaatttcgaggtgtcgtccgtcgtaacagcgtctccactgcaagagtcctaaggactcctgccgttgctgaagtgggggaagagaatgttcggtgtcaacatgggcttcattgatgatgccgtcaacaacgtgttggaaaccgtggacgacatctccgacagcattcacgtgaaggcactacaggacggcttacagaaggagaagacacgtccagatcagacgttcaaggcgctacctgacggcttacaacgagaagaatcccaggaaggcggtgtctgccccggaagtcttcatagagaaatacaccgagcaaggtctcatcaagctcctggcttcgttggacgatggcccgggggccacaaagttcaaggaagaagtggtgacgagctggctgtccaatccggatcacccgataaacatgctcaagcgtctgaaacttgacgatgctggagacgacctcctcgccagtccgctgttggatgtttggacccggcacttgaaggccttcaacaaggagtacccgttcgcagagacgacgatgatccagacgctcaccaagagctacggtgatgaaaagctggcggcgattattcaagcgggcacgaaggtcccgaagacagaacagttggccaagaacttgcaggtcgctcagttcaagcgttggatgggtaaaggaacgaccccggacgatgtctatacgacctttgtgaaggtggatttccgaacgccgacatctggcgcgcgtattgtaaagcttatggcaaggagtttccagggaaactcttctcgttccgccctgatagaaaatagacgcatctcgcttaggctgctcgcagctttgcacgagttagaacgatttgatgtccttgcgcaatacaaccttcagaatttcgtcgatgaaaggattaccgtagatgacaaaacaacacccgccaaagaggttgggtcgattgaagagcttgagacaaagtttgagagtctcgaggtggtgaagatgcacgatacagtcgaatacattttcattggttcatcatctaaaacgaaaaaagtaatggattgtgatgacaaaagtaggtcttgacaataatgtcactcattgtaggacaacagcagcatgtggatatctactaaaattatcacgtttctatttaatttaaacttttaaaaaactaactgatgatattcattaagcaaacggagtgtttttttttcatccggcaattgcggcatgcagtacagtcagacaatgaaagtaagaaaaaaacgtgagtacagactagagcgtgagaacgagacgtctgatatcttcggatttacaagggaatcatatgtggcagatatcactttatgtgttttacattgactaataattgatcgtaatggaataggcgggtattaggtattacccgttcactctctagtctggagtggatttctaaaaaagctttggaatcattcttttagcacaaacaatgtacttcgtcgcatactctattgcgactgatggtttaatgctgcatttcatgtagtcagtacaacagtgtataagtgccatgatatttggaaatcggagtaccagtaggtgcatacattatactgggaggacaggtttagctggctgaacagcctaaccaattttatttcagcggccgggagcccccccccccaactttaattggcaaatgtcgcctgagtccatagtccacagattatagctaccgtaagatcacaaagtttgtacatttcgtggctggttgttcccagaatgtcgaccgtatccgtagtgtgtaccacacactgtagtgagcagttcttgaatttatgaaatttattcggaaagtcaaaactaggatagctgcattttctccttataagctaacatttactcaaaatcattgaaataacaactaacggattgctctttttcctgcgtctgttcgcgccaatggttttggcttcgttttggccccactctaaattgactaaaccccatgaatccttcttgtgtaaatttgtatagctggaatgcatgacgtcaacgcgctcggtcggggcaaagcccccggccgagcgcgcctttaacttctttcgtgtcttttgcacggcaacttcgccattttttgccaggaaggcgctacaccagggtttgaaaacttgccaccaattttcatgttacattattcttgcctaccgcacgtttgcacacaaaggaagtctacactgtcctcccagaccaaagcttcgcttctagttactaatacatgttgttctttcagcgatctcaacagtgttggtagcctgtcatgcctgccctttcattatcagttttcaccgacgattctaattacttgaagtaataatcaactcgcagtggataagctataagatagacttgagttacgcaagatctaagcctaaaagctacgatatgaaatgcgatattagcatcgagatcagcttcgttgagttacgcgaaaaaatatcgaattaagtttcaatctacagtataacaacgcataattaggctaacgtttcactatgaatgtgatcattttgccatgcgggatcgcatcgaggtgtacagttgctcaaggtcaccgcatccagctacttcataggacctcacaacgtggccgagcatttaattttacaataatgcatgcttctaggctcgcactatcgtaccatgctttaaatgacattttcaaatagtatattgaagtggtttctgtctgagggcatatccatacatgtgcttagaatgtggttgcttagaggttatcagcttaagaagaaactagagggggctccaaattaaagcttgtttcagttttttttcttgtcttgtcaccaatactgtacttgcttgtacagtgtacatattaatacagctcgacacgatgtgaatgcaggggcaacaaacgctccactatcatcgtatgacactttgcaatttactttccagactccagttgagtggatttagcttgggacgcccatgcggactattcgagctgtgttctttgctgcagttgccgttgcaagggtcgacgcttccctcagaggcacagattttgaggtagccttagccagcagggagattactgcgcatccaagacactcgagacgacgaatatgaagagcgatctgggggtcttcgggcaatcgagaaggcgaaagctctcgtcaagcccgtaacttcctcggggaaacttaagacttggttaaacagtggaaaacccatcgacgaagtcttcatccggctgaaactggaccaagcaggggataaactctttgagaacctgcagtttcgcacgtggctcaattacgcggatgaattaacggcagaatccgggaaggaagcgtcggccatcgtgacgttttttttttcgcagtgaggtacattgatgttacacgcagcgaggggactaatcaaggctcgagacagagcagattcagcgccggatggcgactgacaacagtgctgacgacgtgttcaagctgataagacctaggtactcacgaggctgttgttcaacacgtggaccacgtaccggcagctcggcattgtacgcgacgctagcagcctaccacacgacttacaaggacaaagccctttggaaagcaatccaagccgcgaagaagaacccgaagacgacgaagttggggactaagtcagagactgagctgctcattatcgctgagaagcagccgattgacgtggtaaagctgatgaatgtgagggaaaacagcagtgcgaactggaagctctggaagtcgcacatgcaggactagaacaagttccacctcagggaaatcaagacctagcgtacgcaattaaacgccagggtcagctggatatcagcaatggtcaagagcgatgtcggttttacaaaagctttaaaattgtttacacgtattctttctctagcatacaattacgctgccgtcgttgcagttgatgatgcgacggcgttccacacttcctggtgagacttggctccttgtgtgagtgcacttttgggtgctgcattccgtggctctgtccatcgatcccagtccagctccagtctaacctgctggttgtcaccctctcggatcccagaccgcaggtctgcgacgacctgagagcgggcctcgatagcgaatcgcttgattagcccggcgtgttcagcggcagtaggaagctgactgggcaggcccatcatggagtccaacacagacatcagcatggactgcagtcgagaattcgcagccccttccccattgcagcacactgccacgttgagcaaagtcgtgaaattcgccgcaaactcattgaacatcttctcgacggtctgcacgcgctcctccttcatcgacgtcagctcacatgcagcaaacacatccagcgatgaaccccagaacttgaggcaggacgtcgcggctcgccacaggatatcccagagcaccagcgcctcccttctcagtggagatgaagtagattgagcaacgtcgccggatttcacacagtccctcagtgaggtggtgaattcgcccaaatactgcgaaaggctcgtggcctggtgttcccacgcagcaagattgacgctcttggagctggcattcttgaatattgcagcacaacatcgcctcaagtctcggcagcgccggtcttcttcgcgtcgctgtgcgtcttcttggactgcagcttggttcgcgctcttctgcgggctcgctgcactagacgggagggcgacagcagccaccttagatccagcgccgagatccttcagcaggctcttgttccggaaggccacgcgcttcacaaactccgattggcagctcttcgggacgagcgtcttcaacgcgccacgagtccgctgcagcgccacgaacacgatcgagttggtcagcgtcggatgcgacgacggaggcatgaacggaggaattgcagcagtgacgcgctcctctccgagccgcagagcttcttgcagcgaagccacaaccgcagagttcgcctcgtggcgagtcttggaggtgatcatcatctggaacgatgctcgagcagcgagagcggcgtcgtcgcctactgtagcagggctgcgcccgacagtgagcagtccgctctccgacgcacagcgatcgacgagtccatcagctcgcggcgtgaccacgtgcgccatcacgtgctcacagatgtccgtcgtcacagagccgacgacaaactccaccaccgccttcagcttcagatgcaccttgaatacagcctcagacagctcgtcgttctcctcctgcactagcgggaagctgctggaaaatcctctagttccagacgactttatccctggactggcggcgcgtacgacgttgtcgtgctttgcggcgaaagaggaggagctattgccgtggtcgtcctctatcacaacctgcaacggtcggagcttgcgcatgggcgtaactggatggccgttggtggtcatcgatccagagccgatcgacagcttcctccgcggcgtcggctgcgcgcgcgtctggatgaagcctcggagatcctccagctcgctcacgcagctctggacgaacacttggctatacaagaagggcaggtggtcttctccagccccagcctctggggacgcatcgtcctcactctctagcgccaagcgtacacgcgaagacgggagcaaatctcgggactgatagtcctcgccatgcaggaacccggcgtcgagcttcagcacgtggaagatgcgttcgatctgcaacgccacgtagagtccagtctcgcccagagcgttcaagcgcggggagcgatgcagcagatgcagcagcaccacaagctgcttgaagtacgtcgtgccgaacgagagcttgtccagtgagagcatggagaggtagtcgcagagccacgggatgcacttggagacggaagattcgagaacgctatcttccagcagcttcttgacgtccagactcgagtcgcgagccacttccaacgtgctgataccttcgcgctctaccgctttgaacgctgcgttgtgcgcggaaagctggcggatcgagcacgtcacttgccactgcggcgagaaccggagatacccgaggaacttggccaccaccttgagtctcagcacgacttccgtgaagtccttgcgcgcatcggccgagggtgaaatagtctcacggatggagtagaattgtctctccagctggtgcttgaccagctccgagaactcgtagctgtcgcagctgtgcaggaagtggaagaagaagagctggttgtccgtgaagaagcttcgcatgcggtccagcgtcgccgtgaagcccttggtcgcgtcgtcctcgttggtcaatgctctggcgtcctgtcgattcttgcgcagcgagttgttgttattgttgtcgttcactttaccgttgttcctgttgttgctgttgtttgagcctcccccggtagcatgcacctgcgcttgaggagacttgttcgacggcttctggctcgagaatcgccggtgcagcttccgcagccggtccgggttcttgacaacgagcttatccgccatgatcttgagcaccaggtccttgtcgctctcgccaaatgggttcgagccgacttggaccagctcctggacgaagaacttggcgaaccaccagcggttctcaggcgagacttcggccagcagctcccgagccgctgcaatggccgccgccgccactcccgcgttctcgatacccacgagactgtgctgcttctgctggaactggcgcaataatcccaggaatccgtcccgcaccttctcgcggttcgtgtacaggagcgactcctccggcgtccgatagtgcaggcgggagtccgtctcctcgttgaacgggatggcgaagtcccgcactgcactcgccttcatctcgatcggcagttgacaacccacgcgcgcgctctccgccacgcggaactcctcgcgcctgcgagacacttcgtccagccgctccagcatcgacccgcagatgccctcagcgtccctcaagctgtgcttcactagccccaatagatcggcgcccaggtgggcgagcaccgactcgatctcacagaaaacgatctccgcgaagtcgaggcagtgcacgcgccagcagaactcggacgcgacgctacagggagaacaagcctccggctgctcagtggggtctttactgcaagctgcgcagtcggcccggtacagcagactgatgagcacctgcagctccgcgctcgtgctcttgacgaaccgctccctgatgaggaacccgtagagcttggccgcctgcgtgttcaccttgaagtcgtccgacgaacggtccggcaaaatggctacattcctgctcttctcgaccacgggcgcgtgctcctcctgctggttcgaggtcgaggtcgacgtcaccctgctcttcttggggctgtcggactgtgaatgggtcccctggttggacggagatgaagattttttctttaccaagagttgctgaggtcgagccaccgactctacgcttttgggtacaatggttgtgaccactgacgtcttcgtcttgacaaccggtgtagccattacgcttcccggggtactggaagaaccccacgccgacgtcggtttgggcaccgaaggcttcggcccccaagccgacggcgcagcaggtgtgttggaggtgaagccagagctagaggagggggcagcggcgcccatgcgcttctccagcagcgattgtttggcccacgccgggggtcttgtgccttccgacgccccgaggggagggaacgaaatggctacaggcactggtcgagccacgaccgtcgagtccttgggcgtcaatagcgttgtagtgatcctcctcttgggcgtcttggctggggccacttggccgctgctaggtgtgcgcttcaactgcgggaactggtcctcgtcctgcagtgtagccatgttgctctcgggtgcagtagccaagttgctcgagcggtcggtctcggagtcgctggagacgcgcgcgtcggcgtgccgctgcacctgcccgtgcagatagtccaggaacacgtgcacgaagtcgtccgcgcgcacgcgctgcgtcttggtgccaagctgcagctccacggcggcgttctgggcgctggaggcggcatcagcagcggagtttggccgcgcgtcctgcgcgcagaggaactgccggatgctgcgctgcacgcgccgcagctccgcgtccgagaagccgcgcaccgccgcccagagctgcgcggccgcgtcgtccgcaggtgtagccatttttcccgcgtctttttggctttgaaatggctcaagcgcgcgccgattggcggccgaaacggcgggggaaatcgaccaatcccacgtcgaagaggagttaacttgggttttgtatttgaatcttgaaatttgtatggaatgtagccacttcaacttggacgagacaggtgttgaaccgtatcggataccgtgcgtggtgaccaacgtgaatccttaggcgcgttctcttggcgagcttcaggcggtatacagctcgtcgattcgccctcgcgaagaagaagcttaggttgggggctagaactggaaaagaacgacgcgttttgtgtcggatcacgtgggtgcgtgattcaaaaccatatcaagtgcagcaagcgcacgatgcggtgggtgagtaaattagttcgtgctccgtcagtgctgcatgccattggttggctcgagacacacgcgcagattccagagtaagttagtcgcccgtagtagctacagaaggagtagcttgtgaatcgcctcgaattccgcccaccaacgagttaacaaggtgctccaggcaacggaccttcacctttgtatcgtagggtaagtttattattaatgctgtcaagaataaatatcacgagtgacccagttagcgtcaaacttttcaatgagacattcgtgcggtcaataactttcgctcgagattgagccgtgctaggaggatcaacgtcaacaatccaagcctggggagatgagagtgagtcgacctgtgcatctgcattgtgtaatagcacccggcagggctccgagtggaggcaagtcaccatcgcgttttcgcatccgtcttgagattgcgcagaaaacggagtctgtcggcaatttttatcaccatgtgtccggctcccagtatgtcgttgttgacgaaatgggtcaagtcgctgggctccaagatcacggacagcgtccatgctcgctactggctctggaggaagcagtcaacggacgacatcttcaagaagctcaagctcgacggtggactcgacgcgatgttcagcagcccgaagctcaagaccttgagtacgtacgtcgacctggtcaacaagaagaacccggacaagaaggtgtcgatggctgggatcatctccaagtcctacggagacttggcgctggcgaataaaatcgagtacgtgctgaactacccgagccagaagcggatggcggcgaggctgtcgctccagcagagggagaactggaaggccgaaggtaagacggcagagcaggacttcactatgatgaagctcgacaaggccggagacgacctcttccagacgccgcagctcaactcgtggttcaagtacgtgatgtatgcggagaaggacgccaattcggccatgatgtcggtcttagtgtctcggtacggcgacgacggcctcgccaagatcttcctcaacgctcagccacgcaatcgtcgcatgaggtgggtgagtctcaaactggagacggccatgggcaacgagtgggtgcgtatgggatacacgagcgaagacctgttcaagctgctcaagctcgacgaggacgtgaacaaggtgctcacgaaccaggccttggtcacgtggatcgacttcttgggtcggtacaacgcgaagaatcccgagcagaagacgacgctgatccagacgttcaccaagttcttcggcgatgagccgctggccaggatgctggcgtccgcgaagaatgtccccagcacggagaagatggctacacgtttgcaacaggcgcagtttaaccagtggctgggcgtgaagtcgacggacgacgtgttcaagctgctgaagctcaatggcaatgtggacaacctcctcaccaacccgaacttgtccacgtggatcagctacgcccttctgttcaactcgaagaaccctggaaaggggacgacgatgattcaaacgtttaccaagttcttcggcagagaagacctggccaagatgctggaggctgccaagaaggtgccgaagactgagaagttggcgaagcagttccaggccgcgcagttcaagcagtggttccgggatggcgtcaagccgccagagatctggaaaatgctcaacatggagaaagccacgtggatgacgaacccggacgcacaaatttggcgcctgtacaatgccttctacaaagcgaacaagccgaaagtaaatgcctgatgaaggatttcatttcattagtaaggtttcgcggactatacgctgctcaatacataccgtgttcatacatcgaaatgtaatgcttgtacgctgccacttcaacttcgagatttcgttttgtaagcgtcggtggcttattattgataataaaataaaatagaatattcatcattaattagcgtgctccacaaccatgttagtgattttcacaacgcgctattattgtgaacgcgttacgcgagccgtcttaccaccttggtgtgtcaacttccgcatgcgtcgggttatctctcatctctcgaattctctctctgctctcgaccagagtccgtcaatcggcacgtacgcaagtagggcctccgtcaggtgcttccagctttttcgatcctgcgcgcaaaggcgaaggaggtaaagatcgggagaacgacgaagacggagcccggaagaaagagtctggaggtcggcgtcgaggaccatcggaagcgtgagccgttgtctgcctctccatttgcttggctcgcttggcctgaagtaagcgtccatgtagcggtatgcagggatagctgcgggccagcgaagtatatggccgaacaatcgcaatcggctgcgcaggaggtgatagcgtagcggttccgtcccggtaaggtcgtacagcttggtgttggaaatccttcgagggtagaccacgccgatgactttgcggagttgttgtcggtaaaacctttcgaggccaaggaggtcagtgtgggttaacgccaatgtcccgcagttgtaaagcaggatgggcaatacgtagctgttgtagaggcggactcgagtcgcttgcgaggtctttgacggccgaagccagatcttccacatccggtggagcgctgcggtggctaggcttttacggcgcgatagatcttcggtagagagccgagcttgcaagtgttgcgccaggcttcatccttggcacgagcgatccgggtggtgtgggctgtcgggctgcggtgaacaattgtgtgttccgttttggaagcgttcatcttgagtgaccacttggccagtatggctggtgcttgagtctcgatcagggtagcgatatcttcgtgtctgcaaatgaagtcagcgtcgtcggcgtatacaatcatgtccgcgaggaggtcgtgggggacgtcaagttggccggcaagatcgcgtgaggctgattcgaggtaaacaacaaaaagaacaggggagagtgagtcaccttggggggtacctgtgttgctctcaaacggagagagcaagtcgttgccgaatcggagggcgagcttggtgtcttgtaggagtagtcggatcaggcgaagctcatcgctgctgacaatcgactcgagaaccagaaggagcttgtcgcggttgattgtgtcaaaagcacgggagagatcgatccccagtatgcggaaccgttccttgaatctctgcgcccgtgctgctatccacctgtgggcccatactgcatcggcagtactgcgactgggtcggaacccgctctggtgaggggacagaaagcgttcgaccttcggggagatgcgctcgagaatgacgagcgagatggccttgcgaatgctgttgaacagcacaattggtcgaaggctggcacattgaccagccggcttgtttggctttggaagtccaaggagaattccgtcacccagatgaatgtttgctccagtagagaacccgtcgttgagtatggcagcgagaggttgagctagtgtcgtagatccgtacatgagtagctcagctgggatggcgtcaggtccggttgcgcggccattgcgaaggcgatggaaggcgcgtgcgagctcgtcggctgtaatgggcctctccagagggcgagccacgctgtcgctggggacgagctgtcggctcgggtcgtaaaactgttccttgaagtgttgtctgatcttggcgcctgctgttttgcggtggagaatgtatttacctgtggagtcacatcgagacgttagtggtgagcgctgtcgaagcagcactcgcgttgcctcgaacatcctagccaaatggctagagcggtctatggcggttagtttctcgtcaataaaagtgcgagcaaggtgtctgctgcgctccctgattttgtgaagtacgtggttgcgtcggcggcggaggtcatcgacgtccagcgcacggtcgttgtagatggctagacagagtcgtcgttgttcgcaggagagacgtgctagttctggatccggcattttggcgcttttggcgagtggaaggtatccaatcgagtctgctgctgattccagtgctgtgttcagcgtcgtcgcccagcgctgatttggcgaacccccctggtgtggcatggcggtgatcttagcggatagtagctggcggtattgtagtcgggagcgttggtcgtgcactaggaggtgcgtggcgaagcgagtctcggcgttgttgaagtggaatctggcaactcgacgccggagcccaccgagtgcgcggagatcaaagtccagcgtgaccagcttgtggtcggtcggcgtgaggataccgccccacgactgtgcgttgacacacagggatttattccgctggctgcaaatgatgtagtcgatttggttgaaaatgctgtgttccttgagtcggagcgtccacgccgtgatgttgcaagcgcgctttcggaaagcagtgttagaaataaacaagtcattagcgtcacaaaaggaggcgagtacgtggccgttgcggttgcgtcggccacgtccccattgtcctaagaagggttcgtgttcgcgttgctgtccaatgtttgcgttgaagtcgcccagtataaatgtcgtatcgcgctgtgggagtttggtgagcattgcatgaaaatcctcgtagaaacggtcgacctcgatagaggtgtagccactgtgcggtgagtacacattgatgatgttcactcgctgggccttgggcatgcgtagttggaggactccaacagggtccgaatgggcccagttcttatacaggaacttacgcaggtgaggtgcaatagcaaaaccaatgccatgccatcggttggatgtcggtagagtcaggagatggtacttaccggccttctgctcactttgatagggtatgcgggtttcttggaggcctaatacgtcgacgcggtaggccgacaggtctcgagggagcgtctcatgttgtttgcgctgggagccaatggattgcacgtttaacgtacctagccggagatggcgagcgggcttccgcgggcggcgtcgtggctgcgttgctgggagctgggagctgggggtgagaggggtggttagagagagatgtggagagggagagacccgtcaaagactgacagacgccgtgaagcgtctgccggagcgttgggcgagcagcatgcttgcccaggcttcccgggagggcgtcaccccaacccgaccaggatacaacgcgctaattcgctgtaagtgctgtttgcaaacgtgtatgtttgctactcgatcactagcatacaaactaatagctcctcaagactgttgccgattgtcgaattcaggtgcgcaccacagcgctgatatgagaatatcgtacatcagaattgacgtagaaaaacagaatttcgcatacaactcaactataaaatgctttactggtattaataagaatcgttataagtaatacaccttttcaacttcaaaatggcaaattgctagttcaaaatgacaaaacgtaagttcaaactgtcacgaatagagtcaggaccgtctcacaatcttatacgagcacgattggatgatacagctcatggtcaaccaatagatattcgatactctgtatttctatatattccactattacaaacaggtttaagtatcggcttacaaagtattgtcgttttgattttacatgttgacgtattgaattttctttttgccattttgaagttgaaaaggtgcaatcgaactccgcaaacatgttagccacactagcaaacagtttgcaaacgttagtcttagctatacagctattagtgtttttgcgaacactaccattcacatggagaacgtaaaaaatcctcttcgtatccctccttacggcctttctccgcgagccccccccccgcgggctaactgcgcttctcccaaccactcactaccgatatgatagatacgaagaccgagctgcgtcactgccaggagatctcctggcaggagagctacacgacgctaaacgagcttcacaggatgcagacaacataataacgcgtgaaactgttctgcagagctttgtgtgcagccacaagttcaagtacactctcatttagcaattctacccttgcatgcattaactcacacttagtaatggatgcacgcgttgacttggtgcactaaatcagagtagaaacactggcgattttactgggattgggagcaacgtttatgctgctattgcagaccaaataggattatatccgtggtacgtcaagtcaaaagatgaccctctcttggcatctaactggtacattttactgggatagctgtggccgataggtcatgctgctaggttctgcgctgtcgccgtctactcatacagttcattatttctcctgctaccaccaccgagtctccgcctgccgtcccggttcccgaatctacgtcgatcgtgtcccaagccttgatcagcgtaggcccgacgggcgacgcatctgccgagtctcctgctggtgacagcgagggcccgtccgcctcgagaagctcgccatcggctcctccaacgaggactgccgctggccccggtgactcatcgcctcccgggggcttgccaaaaggagggtcgtcggatagctcggagacctcggaggatcatgcagcactcatgcgagagatttttggctccaatgacgaagaagaagcctcggctgcccaacggacaggtcctgcagcacctccggcgcctcaggctacggcggccgagattcctgtggctgcccaagccgctccagctgcgctaccccgtcgacctacactcggtcgacttcggttcacgttcacgcgttggtgacagctacagtgactgccacaccgagggatggacctgcttttatcgaccctgcagtggtcgacgcatcggacccggcggcagggtcgcgcaagctcagtaacctggcgtcactgtttctcgaaccgggattcgtgtcacccggcggtcaagagtgttggagtttgatccagaacgctagcgtgcctctcatttttgacgacgccatagttgctccgtgttcggcagacgggatcaaggccttcggcaagtgtgagaacctcgcttaccctttccaagtttgcgccagctcttcccggatccatgcctgatcgacgtgactgggtacccgccaagtcgagcaagttctcgacgggctaccgggcatcaactcttcgttcgcctgaggaggcagttccagggcaattcctttcaccctaacgagaagggcgacctcgggctggccctgtgggagcgtcgtcattggattcgggcgaaggccgtcaaagctttcatcgccaacctcgctgcaacactcggtcaccgcaacccggtggttgtgaagcttcgcaagaagtgggccaagtaatcttctctcccgtcagcgtacattgcctctaatactcggtcgcggttcccatagcttctcctcagccctcgaccgctttggcttaggcgacggcgcgaagaggtgaaatacgtgctggtgaagttagtaggtcgaccgtgggttcggacgcaatagctaagaaggaacgaggcggggcatgcacgctcaagcccgtgactaagtttggagctgaagatggagtgacccgtgagtggtggagtgcaacggctgcgaaccaagcctcgtttgaggcaacgcctcgtgtagcgttcccactcagtagcatgtccactccaaggccaagttgattggctgggtccatcgactaagaccggtcttgtgaaaacgaagactggtcttaccaatccgtaagaccggtcttacagatccgtaagacccgtcttactgactgataagtccggtcttagtgaggcttctgacgcactcacggaggtgtttgagggccccattgctagagtggttgacgtctccatcttcacatctgaccgctctacttcgactgctgcacccaaagcctcggtcgccctcctagtcgcttcatcagcacttgtttcgtctgttgagggtttgaccgagatttgcttgcgtcgtccgttattcctggctccattccgatatctctattccatcgcgactcgttcacttaaccctttcgcggtaaaaggatacagaaagcgccctttagatgattttccaaaacacggtagagtgtaccccctcttaaagggcgcatcctgtgcccttttgcacaagttcaagctagtgatcaaccttcttttaaaacaaatcataatcggtacgcagagtaatcatcatgtaatcattgtttatacaaattctaagtcatacgcatacattctatgtatcctgcaaatcaccgtagatggcatgtcacatgagacactccgaaaaggctccgtaactttgtaaaaggacgcctagaccgcccttttagaaggaaatctcaatgagttgtatactataatttattgagggtactcgcgaaagggttaacacataacatgcagattccagtaacttcttcgtttgtcgctgcgagctggatagccctcgcaggcagttcaatcatcatctccagtagcctcgttcgcctgacatcgcgggctgggttgcccctgcgagctgttcaatcctcgttggggcgcaggattactcctcgtcggctacctggaccatttgcaaacgtcggtcgcttcgcttccggcgtaggtaatcatacaggaggccaccgcacgacagattggacgccggttcccatgtcggctcgtcatagccgacccacttcaccttgaactctcggacggcccggtgagtactcgttgacaacggggtccggtcatagaggatagacttgacttcatactcgccatccaggtggtccggctcaaaactgtcttcaggcagtagttcctcgtcgaagtcaagacgagtgtcttcggtgacctcacaagccaaacgaaccctcggtcggccttcgaactcgtccactgacttgagtcgtgaagcatgcaccatcgggtagaaccggtatccccttcggtcgggtaattccaactcatacgcaaactcgtcgaccttcttcttcacgcggaacggtccgtgccaccgatgggctagcttcttggtcagtcctggtcgaacccgctccatgtacagccagactctgctcccaggctgcaaaaaaagccttgttctcgtcaatgtagctccaccatggtcagggaaactcggtgctcggtcgaccgaggttctattctcgtgaaagcctgccgtagcttccttctccttcctgccaagtgatgcattgcgttcttcagctctccgagccttttccgcggcttggtactccttggccatcctcagggcgatttcccgctgtcggttgacctcgcggcgccatgctagcgcgtccttttggctaccgaagcctcgtttgagtgacgaggacattgccttgagcgtcgactgtgcatcccgcccatgaacgaggtaaaacggagtttccttcctcgtcgtatcacgggagctattgatggcgaagatcagtctttcggcgatctcgtcccaatcctgctgcaatgggttttcagcgtatacgcggactgactgcatggtcgtcttcaccgatctctcctgctggcctttggcctgcggtcggtagctcagggtcgctctcgaccgagactgcatcatttctgcgaagtcttggaagacctcgctcataaatcgaggatctcggtcatgacggatcaaggacggtgacccaaagcgtcggtagacacactcctcgaaagcttgcgcaacgagtaaggcagtagtgtcggacatggcattgctcatcacgaatcccgtgaacgagcattggaacagcaggagagccgtgttgccacggcgacgcttcggtagcggtatcacgaagtccatagagactagttggaagggtctctcggctaggatgttccctggcgagtacccgcggaactgaggtcggctcttacttgaactgcagtcagggcacgacttaacgtgtttctccacatcggcatactggccgacccagtaatagtctctcgccgctcgatgtagcgtacgggtaataccttgatgaccgccttcaagtgagtcatgacagctttgcaggacctcttggatcatcgttgtgggcaccacgagtctcatcttcaactcggcctgctcgccgtcacttgaacgactgctcgttcttgtgtaatatagtacatcgtcctcgctcaacacaaattggtccgccattttccatgcatctcgtgctgctctgtatccaatcttcgcatcatctccccggagcactgccttcagattcgaccaccgtaactcttcatcttgagcggaggcgattctccttcggcgttcttcctgtactaccagcgggtcaatgtcttctgcgttcggtgggcctggtgacgtctcggcacgcagtggtgaagcttctgcttcattctgagacaccattggcttctaaccggtgagatgcgtctccctgatcggtgaccgagacttcatctgcaaaccggacgtgtttctcctttgctctcgcttgacgtctggtcatcacagctacgtgtccgggttcaatctcgttctgccgtctgtggtcggtctaggggtgatagcctgtcggaaggagtcattgctgcaacaactcagtcaccaccaagaactcacggccaagcttcggtcggtgaagtacctgcatgtggtgagagagtttaacgctgcggccgactctctagcaagcgagactctcgagggcaagaagtctacggtggtattgtaggacgaccgagtattagagctgatgaagctgaaccgtatccctgaggtcatctacgaggttgctgacggttgcgtcgtcaaggacataccctcggccaacacagtatgggctgtggtagcttctgccaaacctcacagcaagaaagttttcgattttgtgtgaagagacggcttgctggatcgcgagtctcaagtcgccaacgatgactagatcgctggctccatgctgtaatgcagcagagacgccgctgttcatcccggtgtactgagcgaggattactatagtgttcccgaggtaagcgcttgcagcaagcactacagtccactctggtagcttccatagtatccacgagcaactgccatatccaccgttcttctcggtcttcgcagaaccgtcaaacaacataacgaagcctcgataggaccgcggtaggcgtgcgtagagcagatgcgggtccaaacgagcagtcggtggccctcgggtccggggtgtgaccatcgccagtaacttatccaaatcaacgaagttcgtcaagccggcttcaagtagctgagcaaacgaacagtcggtttctttgactcgttcgaccaacatgacacgaggcggttctcagtttttcgccgacgacgtgccattctagaaatgaattggagcttgtataggacgacaagtggcggatgaaatggatgcggcgtgaatgtacccctgtgacacgagtgaagattgtgggagaaaagtgatgctgtggaatgaattctgcgcctgaccgcagatggacccaactggctggaagtgtgaatcctgggaatgcacgcccaggatttcagaaaacactcagtccagccgcggactttcccttacgatgagtgcctaaagtctggcggaaagtgtctctggcgaatgtatcccagagtacacctcatcttgctgtggctcagagtgccccagaggatcaaattaccctgagaatcagcccactaccaccatgatcatgcgcaggaggccgctaaacccgctaaaagtttggctttgtggaggtacacgcgagcctgcaatgtagcagacttgttacccagagtgccgcatgatgacccagtgttcacctccctaagtgcagctgacccagagttccaagatgattctctgggtttggaccataaatccatactctcgatactgaacttaagtgtatcccaagccaacacccaagaatccccacagttcccccagattcctcagaattcccaggatttcagaagatgaccctgagtgtcacctgattttcacggattcgagtcagttcgacgtcagtctgcaatcaaagtgatgcgtgacctagaagaaccgttatgaatgcgcagactggatactttcgaggagtcgagaggcaccatacaaaaccgagcccaaggacccacaattggcattttcgacgccgtgtgacaatggaatcgcaagccgatcgcaagtttggaccgctgaacccaaggtatactcaagacaagatatttgaccccaagcatagtgaacagaagatatttgcccgaagaagaatgcagaagagaagaaagtaagagagagagagagaagtagcaggtaaaagacaaacagagttcaattttccgtgtactgcacaagtgacttcggccaagcctgccgacggaaatccggaggacccgagactacgaccgcgggacgctaagggcacatcaatggcgaaggacagccgtctgtgtggactccatcaactcaagtccagttaggtggggaccagcgactttctggagtgaaccatctattccatatcctagttgggtcacttgctgtgcttttggtagcccatttcatattattccagaggtattctggggtgctaggtagtcgcctccaggattttgtattgactgcgtgtgtgaagggaagggaactgatagtgattgtatttcgtcctttattggaggtagtgcgcgtttgtgtgagtctcaggggagctaggcccctgaatttcagactcgagtgagcctagtgtgtgtgtgacccaccgtccaagggaccaaaagaataagtgacgactagttgtagtgtttgtatactctgtatttgttggtttatcgagctaggagggcatttgggtaaggtgtcttctgagttccaagtcccggagttgactgaaatcctggaccctgaattcgtgatattctgggtttcgggggatctgattctctgggtttgcctttggtgtggaggtgcgttctagattagacgtgcactcccgcacttcttcgaggctacatttacgaccggtggagtgccgttccgtcgaagacaaacgagccgacagggattacacaaggtacccacgccaaccaaggagtgtgattttcagggtttaaagctttgcggctgcgaatctctgggtctatcttcttgctgttgactctcaagtcgattctctaggtctacaccctggggaacagtattgggctgcgctatacgaacccccctgggcgataaaggtttcatcgacctcgcctcagcaggtgcgcgtgcccggattcgattgtcgaggatttcgccggaatcaagtgttgaagaagtgctgagtgcccgtcaacttcaagctaccaagatatctcgaggacgaggaatgaagaagagtggacgcggtgacggaggacgcggtgaggcgtcacgtcagtcgcgtcatgtgcaaggtatggagcctgaggagcacaaggacctggaaacagtcgtccgcgacggtcagagggcgaagaaggctgctcgcgatagcgaggcagtgcaagatggggacgtcgaggcgtctgcagttcaagatcagcctgctgtaggatcgcaaactcaggaggaagaagtttcccctgagctccaaggttcgacggaggtgaattctgggtcgcggattcctgacgagcacacccgcgagggtggtgctcaggcgtctgagggatgcgccaatgcggttgtgcccccggaggtgattgacttggtctcatcttcggacgagtctgttgtggaagtgaagccggagcccgtgcgagcgaagaaggaggcgaagactcagagttgcaaggtgaattctgggctcgcaccacctgaacccagagtttcagcgccaagttcgcaagcggcacccgggaagacgcctgaaagcgacatccgggagctgctgcgcctgttccggaatcgggagcagcggcgttggacactgagagcatggtgctgtacgtccgacgtgaagttcgacgctgggaagacgtgaattctgggaaggtgacgcccccgagtgtcgtctatgaatggccgaccccgaaaccggacgccaactcgtacttcgcggccgcgtacgcaacgggagactacttcaagtggcgtttggctctggcgaaccaagatgaagcctggatctctaagtttcacctcgcccggtagggtgtcggaactgcccaggatctcatggcgactacgattccccagaatatcatgaccgcacgcgagtgcgtcgccattctacagaccctgttcttcgaagctggtttcgagtttgtcaacttgattcctggctggtctacaacgcgcgcttccaggattccagaaagcctggtgcgctcggtcatggaggaaatccagaatttcatcgcggtggagctggtcgagtggagactggtgatcgctggtgcgcctttcaaggtgaactctgaagaccaacatgcaccaagcgttcaagatcaagcgccgagattggattatcacaaggaagatggagtcggtgatcaattgatgacggactacgatgcggatctactgggtcgacagattgtcctgagattcagggtcacgggactcaggatttcacgcagcccgcgagggttaagtgatggtgagccgcgatccaagcgcacacagcatggaccgcctcgcccgcaagtcccgtcgacgccatccgcgctttctacgccgtcgctgtcttctcttccagcgtacaagccctcgactggtgcttcgctccagaattccactcccctgaattccatgcccattggtcatgattctctggaggcggaagccacggatgccgccccaggtgcggtgccaagcgtcatcggcacttcgcgtgcttccgatgagagaactgcctcgggcgctcaaacgtcctacggcagttcttcgtcttcgtcgatgatctttgggtattcggattctctcgaagctgattggagaatcagatgtgactctcagataagtgggggaggatgtaacggggtacaatcaagtgtacccattacatgaagagtgacgggtgtcactctcccgagtacgtggtacatggtaccagtagctccgcaagccaaccatttgagtttgtgtgggcttttgtatagttaacttgtagtttgtatgacgaccaagttaacctctaccaaatacacaaaatacagtaagtcttataacctactcctttgtagcaaaccgttccctttgaggccgggaactggtgcactgctgttcacctggatagtaatgtccactcgcacttcctctgtgcattgtgctgtgtgaccccgtcacagtaccagtaccagcgttttatatggtgtttccagccaagtcaaagacgatatggtgtggagtgtggcgtgtaacctgtagttccgcttgcttagacacaaacgtcaaatgcacaagcagcagggcagatggctttactgctaattgttgcgattggacacttcgcaggctcgcaccaagcacatcgacatccgatatcactatatccgcgagaagatcacgagtggtgtcgtggagctcgactacactgtgtctaagaacgagctcgttaatttcctgacgaagggattgtcaacaaagactcttcgctacctgatcgagcgcagcaacgtcacggacatgctcgagtagactgcgaattgagtgggggtgttgcgattggacacttcgcggtctagttgtgtgactccgcatcgaggcacgtgcggctgtggagttgttggcaagggtatacaattgcagcggagggctgcaatgtgattggtcggtctgccggattttgcgattcggatgggccgagaggaggtcaagctgaagttgtcgttttcatgggatctgcaacaatcgacattttccctgtgcacccctgaaagaatatggttgagttagaagctggaatctcgtgtactcgttggtaagacatgataggacagactctataaggtagttttactaaactcaatctaattcactttcgtatttccttcctaaccaacactcgacaaccaagcctcgcccgcataatctcaattctaatctggataaaacaagttcgtgtgtcagcatcagtacacggtgtgcactggaccaaccccgacgatggtcgattgctactgaaacatcacatctacgcgtccatactcgtttgcagccaacatgtattgtgaaaaccggcaaagatgtccagaccagattagctggattaggaggggtagacaatatataaaaagggggtacgccaaatcctaaatcgtagcgttggtcgtaaaccgtccatgtgcaaactactatcaaatgctaatgagagcctagcttcctgagctgtataaatggccgcagaggtgcactgcatcgtgcggcgggcaagagcaagcgtataagcagccactcgtgccaaatttcggccccgtgaatagttcagacgcagacacatattgcaggtacccatcgggtgtttcatgtatacggcagcgtcgagtttgccgtccacgttgacatggggcaccgttcatataaacgagctaccctcataatgcccagtggatgcctgccaaacgtatagtaaacggtcgacatatctgcagcagatatgcccgacttaaaacacatatatgtcggcatatcgcgtgaaagcttcaccaaaatgtcttattgcttctgtctacgtccggttcctactgccctgaatcaggtggctacactatagtatatgcagtcacttcgatgtgaacctgtcaatgcgaagtcaccactacttgacggtacagtgcctcgaggcaccatgcaactcgacctggatgcttctctaccgatttcgattgggagcgatgtcaactttataaacgcgactagtctcaccaggtgaatttattgattgagttaaatgatacaaagctgtatgtacctaacgtgtgactgtgtgctgcagaccagctttccagcaggtgatgcgaaggtttgcgcgcttctacttcatccccaaggcccagttgcgcggccacccgccccagctacgataccaccatcaagtcctgggactggtgctctcgttctacgtcggctcgatggaacagagctcgctgtccatgctctttggcgtgtcgcccaacatggtctcgcgcatcctgtgtcgtgcagaagaggcgctgtccaaggcgctgcatgggtacgccccggcgcgcatttcgtggccatcaccaacgcgccaagccgagctagcaaaactcgtcgaggcacgcgagcccctgctcaagtacacttttggtttcatcgatggcaagtacttctgaagcataaaagaccacgaccagcgctacattcccaccagaaactcaccaacctgcacgctgttacatgacatgtacattgtacaagcaatactgccattaactacgctcgcacttaaaaagtggccacgtgatctgtacaagtcggcacagtactacaactacttgtacagtactgacgtacgagaagactcggatttcaggtacacttgtgctagcttggccaagtggtaataacacgatgctcgcgcaacgatactatccaagcatccgctcaacctttcgtaccatcgcatcccaacgttaggtccaatacatttgtatcatctacgcctttattcatcgaggccttggagtcccaggtcatggcaaatactgcagtatatccttgtgttactaacgtaaattcccaaataataccccttaccggtatagtaccctctaaaacgtaacccagtgcgtagcccagggttacacggttacttcaatacaaatatcaagtataattttgtgggcttattgtcgaaagcatatttatgcatggaatactgtataatatacgtaatttatcagattttgggagggtactaatacagtaatgtgcgtgaataccggacgggtctacagctaatacccttgtataatttataattatgggcttacgatgtgacgagatggtgatgagcaaaggtactgagctaaaaatccattaatctcgtgatgtcgtattcagcggtaatttgaatattggcgcgctttcgccactttgatttcctttaaaagcgttcacttcctcatttgcgatcaaagcctcaaactatcaaccaaggtatcatccactgtatcaagaggtatgtattatcagagaaaatgttgtatgcgctcgaccaaataggagaaggagtagaagagccttataaggttgacattcttaccgctttgatgtggtgtgaggacgcctggtcgaaggttactgacagcattgctggtatcactcggaccttattaacaaggccgccatcaatttcttgacgaactaaatcatatcaatacattcctttttcttaaccaatcggattcaacttatactcttggagaccttatatatatcaggcgtccggtattcacgcacattactgtaaatagtgcccggggtattattcggtaatttccgttaagtattaccctcactgcaggcacactgtagtggatgacattccgcgcaattgactgacttgtagcgtggtaacctgatctcggccaagtcgcggttgccgtgcaaagtgcttcagtagttttgctgggggtacgcatcagttatcgagctattagacagcgatacgcacaccgccgtcgccagttccgacgggcaagcgtcgtctgaggcgtctggacggaacgttggtgtcagcgtcgataacgtccatttcgatggagctgaagcgaacaccgagccagaaatagggggagctggcaacatgggcaacatgacaggcagcgccgtgtagaaatagtgggtgcagacaccagcgtacaaatgtgcagtggccgtggccgttcgagtggaactcgagctcttgagcttttggcgaaagatcggatccagtcgcctgggaacgaggcacgagttatcgatgggccaaatcaggcctgtcggtcttctaccctgcaaagggatctggcggagctctggcctgtccaaggcgacagcgctgaatttcgtgcgtggggggagtgccgagcgaagccaagcaactcgagcaagtcgatcgtggcgcgaggccatcgtcgtaaggtcgccacgcgcaaagagccggacgcccatgcagaaacgaaacgatcacctcccgtttatttcaacaaaggcaactttcgttcgcagcacgtccgacaacaaccgagttgctcggctttgcgtccgatcgcaggcacgccgcgtctgctgttgctgactgtcgcagcgcccaagtgttcaccacgaagcagcgctcgagtcgcaggataccggtacttgcaagtataaaggtggcggtgagggccacgtgtttcccagcacagtctgttactgggagctggccgcacccgccaccacgagcggctcgcttcactaacgcttcttataaatactgtagacgtattgatggcgatatctccgtggcttcggtggggggcggaccagcgtctgcggtgccggtttcgtcttccggatccagctcggagccgttgtaaacttaagcgggagctggctttgggggtaggtggagttcagtttctgggctgatcgttctgattggtcaacggggcgggagtcagaggaatgggggcgaccatatgatggtcttgttgccccgcgccctgacccgagtgcgcactcaaccccacacaaccaaacagacgtttggcgtctcgagtgcgcactcggtgtcgaccatcactcttgcagcccgcccgcaggcaagcagtacgtacaggcaagcaggcggcaagcgagcaaggaaggactagaccctaggcagccatggccacgacgcccggcggcaagacggaccgccgccgcgccggctccaactacttccaactggacgcggaccgcaagcgcaacacgtcggccaaccgcagccacctgaaccacggcgacgggcgcggcacgttcggcgaccgcctcagcatgatggacgtcgtgcccccgcagggcggcagcgccatgcgcggcggcggtctcgagggcgacttcgcggacgaggtgtccatcgacttctgctgcgaggtgctgtacaacaagttcggcttccagtcgggctcggtggacaaccagcgcgagcacgtgctgctgctgctggccaacgccaaggcgcgctccaagccgcaggacccgccgggacaccacgtgctcacgctgcacaagaagctcatgagcaactacacggactggtgccagttcatcggcgcccagagcgtcacgtacacgggccagccgcagggcgacctcaagaacgcgctgcacatggacatcatgctcttcctgctgctctggggcgaggccggcaacctgcgccacatgcccgagtgcctctgctacctgtaccaccaggcgctgtgcatgctcaaccaggacttcctcggccagcaaaaggtgcccgagggatggtacctgcgccaggtcgtgcgccccatctggaaggaggccagcaacatgcagcgcaagaacagcctcggcaagaacctcgagcacacgcaggtgcgcaactacgacgacatcaacgagtacttctggaagaagtactgcctcaacattgacatcacgcagatcggagacgagctcaccaagaagcacaccaagacgtactacgagcaccgcagtatcttcacgctcgtgctcaactactaccgcatcttccagttcaacatgatgttcatgatggtgctcatggccatcggcttcatctcggccatctcgcccagcggcggacaggagtggttcgcccagttcggctccatgggccaggtcgtcgagccctaccagcagcaggacgtcaagctcacgtacgtgggtatcgtgttcgcgctttcgtctatgggcttctgcaagactgtgctggaggcctgccacggctggcatttgctgactgctagcgagtcgtcgcagacgtcgtcacggtcgttcaactacggaggtgctctggtggtccgcatgctctggaacggtgtcttcgcgggtatcttcggtctgatgatctacactccgttgatcacgagcgagaacacggagctgctggacaaggcggccatggcgtcggctgcctacatcatgcctggcgcgatcatcatgaccattcaggcctttgcgccgtcgatgatcaacaagacgttcgctgccaagttcattcgtgagggtgagacgtgctacgttggtcgtaacatggcgccgccgctgagctaccagatcaagtacatcacctactggctcgtcctgtgggcgctgaaggcctacatttcgtactttatcctggtgcgcccgctgattctcccgtcgcttgccatttacgagatggagctggagtacggtagcaacgtggtgtcgttccacaacttcggtgtgatcgctgcgctgtggttgccggtgattttcatctttaactacgacacccagatttacttcacagtgttccaagcttcccttggtggcatccagggtctcatcatgaagaccggtgaaattcacggcatcaaggagatcaccaaggccttccgtgtggcacctcagctgttcgaccaaaaggttgtgaccagccttgctcggtcaaacgacgctgccgccgatgggtctgccgctgcttaccagtcgcagatgatgctgcgtttcgtcgttgtgtggaacgaaatcgtgaattctttccgcgagggcgacctggtggacgacaaggaagccgccattctgcagtacgatatccagagctctggagatgtgtttgagccggtgttcctgtcggcaggtaagcttgtggaagccctcgactacacggtcaagctggccaaggaaggcaagggcgattcgcaactgcaggtgtacatggtgcagaaggactgtctctctgctgtgcgtagcttcttcacggctagtatgtacgtgatggaggcgctcttgggcagcgacgatgctgatatcctggatgcgctccgccaaatggagacgatcgctgcaaacggcagcttcatgagtacctttgacgctaagagcttggtgcagctgcgtactgtgtcgatggagtttttggaggctgtgatggatctgccggacccggacgctcagtcgtcgcacctgacgacgtcgcgtgtgcacaccatgggcgtggtccgcaacttcgtgaccaagatggagaacctgcttaacgctatccgcatcctcgcgaaccgaccggagctcgccgccaagttcagcaactccaagttctgctcaagtgcgaacggctacgtgtttgctgcccgtggtctggtgaacctcttccacaacgacactgctatgggcgccgctacgcgcgcctacttgctgatgtcgctcgagaaggcggacgcgatgccgcgcgtaccggaagcccagcgtcgtcttggtttcttcatgaagtcgcttgtgatggagatcccgcagctgatgtcggtgaaggaaatgcactccttctctgttgtgacgccgttctacagtgaaagtgtgctcatctcgctagcagagctgaacgaccctctggtaaaccaccctgttttcaagaaggtcgaagagaagggcaagaacattaccattctgaagtacctgatcacaattcacccggaggagtgggagaactttttggagcgtattgacgtgagctctgcagaggaggcagaggcaaactatccgcttgaaattcgactctgggcttcttatcgtggtcagacgctcgctcgtactgtgcagggtatgatgctgtacgaagacgctatcaagatccttcactggctggaaatcggttcgagccctggtaagactgctgagcagaagcaagctcaactggaggacatggtgcgtctcaaattctcgtacatttgcgcttgtcaagtgtacggtaagcatcgcaaggagggtaaggcccaggccgatgacattgactaccttctgaagacgtacccgaacttgcgtgtcgcttatgtcgacacgattgtgactgacggtggcaagcagttcgacactgtgttgatcaagagtgaaggcaacgaaatcgcggaggtgtaccgttacgaactgcctggcgacccgattcttggtgaaggtaagcctgagaaccagaacaacgcacttccgttcacgcgtggtgagtacctgcagactattgatatgaaccagcagcactacttcgaggagtgtctgaagatgccgcagcttttggtgaccgctgacctgcacccttcgaagaagcctgtgtcgattattggtatgcgtgagcacattttcacgggtaacgcttcgtcgctgtcgaagttcaagtcatggcaggagctggtgttcgtgacgctatctcagcgtgtgctggctgacccgctgtacgtccgtatgcactacggtcaccctgatattttcgacaagattattgcaatgcctcgtggtggtgtgtcgaaggctagtaagggtatcaacttgtctgaagatgtgttcgccggattcaactcgacgcttcgtggtggtgtcgtgacgcacgtggagttcatgcagtgtggtaagggtcgtgacgtggctctttcccagatttccatgttcgagggtaagctcgctaacggtgccggtgaaacctctctcgcccgtgaggcccaccgcatgggtcagtttatggatttcttccgcttgaactcgatgtactactcgcacacgggtttctacttcgctacgtggatgacaattgtgacgaccttcgtgtacatgtactgcaaggtgtacctggctcttgctggtgttcagcagcaaattgtgtacaacatgaactcgactgctgtgattaccgacaacattgagaacaatttcgacgagcgtgtgttcaaggacttgaaggcagtgctgaacacgcagttctacatccaggccggtaccttcttgatgcttccgctgatgtgcgtgtacttcggcgaaggcggattcgtgcgcggtatgacgcgattcatcgatatgatcatcacgctcggccccgctttcttcgtgttccaagtcggtacaacgatgcactacttcgacaacaacatcgtgcacggtggtgccaagtaccaggccacgggccgtggtttcaagatttctcgagaaacgctggtgttattatacaaagcgtatgcaagttcacattatcgaaaagcttgggagctgatcggtttgtgtcttgtgtacttggcctttggtaacttctacatctgtcagaccgacgcgtctgccaacgacaacactttcgcgtccgactactgtgagactgcccaggcttacggtgtgcagacgttctcggtgtggttcatttccattctgtgggtggtcggccccttcatgttcaacagtgacggtctcgacttcaggaaaaccaaggttgatgtcaagcagtggtgcatgtggatgtttgctccggaagactacaaggatgatgatccggcgaacaagggtggctgggtaggctggtggaagggcgacctggagcagctgcacaactcgaacatgatctcgcgtgtcactgttatcctccgtgaaagccgacacttcctgctcatgttctacgtggcaaccctcgagacatctgacatcatgtacgtcggatactcgcttggtgctgcgattgcaaccgtcgttcttctcggtgtgttccacggtgtcggtatgggaatgcggtccatgagtccggttactcgtgcggtcatctacttcgttactatggccggcttggtcaccgcttacttcctcgctgcttggatcgtgatggactggaagttcaagtactcactttcgctcttcttcgcgtacgtcgctgcgctgtacggcatcaacgagtgcttccgcatgtggagcttcccgagctcgtcgattgctggcatcccggtgttccagcagctgcagttcctgttcgacttcattttctgcacgggtatgatcatcccgttggtcgttatgtcctgcatcccgttcttgaacatcatccagacgcgtatgatgtacaatgagggtttctccaaggtcatgtcggcctcgtcgcagtatgcgttctcgttggcggccttcatgggtattctcggtggtgttggtgtgggctggctgttcaatctgctgtctacgctggagcagtccgcaagttttgctagttacgtggtgacgtacgatggtgtgctcagtggcaatgtcggcgacggcaccacgacgtacatgctgtacggtgcgtgctttgttggtaccatcatctcaggcttcctgaacttcttcctcggccgtcgcttggccatcgttgccggtggcttgttcagtaccctcggcatggtggctgtcagcgcgaacgacgatctgcgtaagacgctgctcatgcctggtattggtctgctcggcgcttcgtgcggtattctgctgccttcgcttgccatctacatcttcgaaatctccacgaaggagatgcgtggtaaggccattctgctgctgggcatgggtttcattgctggtagcttgcttggcggtattttcgctaccgtgaaccagttgggctggatttggcagacgtttgctgcctgcattgttatcgcgctggtcactccggtggtgaacgtgttcccggaaagtccgtactgggtcctggaccgcaagggctgggaagcgtgcgaggcctgcctcgttattctgcgtcgtaagccggacgtccaggaagagctgaagatcatgcgtgaagaggagacttcggacgatggtggctcgggtcctttcaagttcttgattggcctgttcctgatgctcgtgtcgtcgctgacgactggcttcctcaacgccttcatcagctacaagggtgccagcgagtacacggatcaggatcagctcttcgtcaacgccatggcgctgcagatctctggagccgtcatcgccttcttcttcatcgacaaactggaccacaagtccgttctgttcggtacgctcatccccgtggccatctgcgctggtgtgctgggcttcaacgagacgtcgcagttcctggccaacacggaaggatcgggcttgtacgtcagcctcgtggtcatgctcatgtacttcttcatgggtctgggtacgagttctgccccgtggtcggcctgtgtcggcatgtttaacacgcgtggccgggcctcctcgacgacgatgctgttcaccatcttcttcatggccgaccttggatacgtgtacatgcacacgcacgacacgatgatggagaaggagtacctgtacctgtacgccattgcaggcttcagtgtggtcgccctggtacttatcctgggcgcgggcaccaagagaaacggcatcatctgcaccaaggctgaagctgagcgtgaccgtgatcgcgcggctcgcatgcgtgccgagcgcgcaagtcgcaacacgcggactcctggcaacgcccgacagcggaacatcagccgtgttcggtccaagtcaaatgtcggcggtcagcgcggcaacgctacccctggcggctacgcgatgtacgaaaccccctccaacgccgcgccgccgctcatgcacgcgcgcccgtagaggaacaagcaaatacccgagctcaagcagctcgtgtcttcaagctgtccatagtgtcaaggtttggtttgtacattcatttttgcctcaatacagacttgcgtcaagttttacatgaataacctcgcgtccaggcagacttgctaccacgcttatgccacgcttggtcctacaatacagtatcattatatgaccagtaaataatgtctacttgcacaccgatgaagaagaagctctgcatcgtttccactcgtcgcgctagcaggtgcatggaaaacaggggtcctgcaaacgacttatttcggaacgctttcactaaatatggagcgatcttttgtttttggccagcgctagcgtccagtttttcgctccagttatcgtccagttttcgtatttacagtagtaaggaatcgagtaaggaatcgactccagttatcgtacagttttcaaaaactacactatatgtgcgatctcgagcccaaattgtgcttgatctagacaggcaacagttcacagccttaactcatcgtaaggtttttgaataagtaaatggcgaaggctggctcaacagtgctttaacctcgttccctccctaggaacgagcgttcaaaattacctttttcgtacttagtagaatgcacaattagccaatcaaaagccagaattcgaaaactggacgctagcattccgtttttttttgaagtggttccataacaaattggtccttgtgggagctgggatcagatatataatcgtggcggcccttaaaaatgtcacgctccggtggtccacactaaattaattctcaatgacgattggctaatacacagcaatttcagccaattataaaagagcgcctaaacggatctcagcaccgcgacccgagtagggctgtttcgtaagtgcacgaaagtacttttgtgcaaattcatcagccctttattacggggatagcccattgagacatcaatgaagattctctactacgaacgattaaaaagcttgaaattacaggcataaccctaccaaaaccggtgcacgaaacagccctagacccgagcactgtggaagcacggcgctgtaggccttgagataatgaaaaagctgtaccggtaccaatcttaagtttgacccattcaaacagattttgtagcatgcattcatttaaaaccattatcgtggggactattctaaagtacaccgtctgaattgttcatgcatgtactgcatccacgcagtgacacctaaagcagttatacagtctttgcgttttcctgattgatgcaagtcggtattgaagctaccgtattagggttggttctacgtatctaatgaagtaagtttatgatagctgcgttctctataagtaggatggtgttctgaggtgcgtcctgtagagcattgtgtatcgatgcgattgtctatccacgcgcgggcgtctattagactgcacatagcccgaaaacagtactcaggcggtgttcatccgcctccacggcttgatgttaaggtatgcaatgaggcaaccttatacaccccgtttaattaggaatagttatcgctactgaccctgataaatgacgcacacttgaggcataacatggtgtgcgcagcgcaaataacctcagttgagacaaatgggcgtgttcaatggtatgctacgcgtgggcgaacctcgcaacacctacatgcacttatttttaaaaagtactaaagcatttagggtcagtgaatcagggaagtactgatacatttgcgaatagcaaattgcaatgagggcaaaagcttgcaaagggctactttatcgtctgcagcttaatattgtcggcagcagtgaagacgtctactaactacactggacgtcaataatagggcgactgttgtcatattgtagctacaggaaattagccgagtctgcgtacttattccgttgtagttggctactaggcggccactcaaaaccattttgcgcgctgtagattctaatgataagtaaatgctaactactggaacttctagaaagcatattatttacagtagatggaggctacacctcacgtctcttcgctggcacatgaactaagagagactattatgggctggaccgcgcagcaaggataacgcagcaaggataaaaatgtaaaacgaaaagcagcatgaatatgtagaatctacatattcgttgtagatcctttgcgtgacgatgaaccaacgtttccccaggatcctcattcatatcaaacgatgttgcagaggcaactgaaaaacgacaacggtacccactaataacacagtccagcaattcagcatatgcaatgctaagtgcatcgccggttccccggtagactacgtagctatatgccgagtagaacggcgactagcgtttagtttaggcaagtaacgcaatacaccgcgtcgccgttcccggcttcgtcacccttccccattagatctttgagcttcgcaacgatagatagcaaggcaccataatgaaccctcacattacatacatatgagttcctactatagtgtaactagcacaccaaatattgcagattgtaggctacctagccgttatgatagtggtgaggttcatgtgtgctgcttcatcaatagaaaacatcttgccatcgtcgtcgtgtctcattagatccagtattgtaaaggttgctgggagacattgatagccactggccagcttatacactttattttagttaggacctgccatgccactaaaacatggttccttcgagcaagcctcaatagtctttggcgagcctgtggcataggacgcaggtaggcgacatcagcgaaggggttaattgcccccttcagacgagacacaagaccgatatttggggtcatttttattttgttaggtgtagcaacaagatgtttggggctgtatcgtggtgggcgacgctgctcccatttttgctttcacgattcgaatactcaaacgctgtactctgtagttttcgtgcgcattcagacttcgtataagcattcaagtgcattcatatctgcgcgtactgagtaaatttgcttgctctaggtagccgcgttgagcgccatgtaaaacatgtcagaactgattcgtgtctgagctttcgagtaagttcaagttagttcagttttgatgtttttatttgtgccgtcatgactgcagcagaacaagctactcattggcgacccatgcccctcaagttgtggctctgaagtagcctttggcatgaaaaaaagatctgtaacatttctatacaaatgttgaaatcagtacgataataaattcctgatcggaatttttccccgctgagcgaagcgaggcgggtggtctcacgcgctcggcttaaccctgttcatagagccccgcttgcggggctccgcttggcttgtagcttgtatatatttgtgacaaataatttgtctaaaccgcattgcgagctatctcagcgcaccgcgcatgtgccagtttttgatcttcgtgaccaagttgcgattcatgctctttgtaacgttagtattcggtgtcgcctagactagacggtctagtgctctggatgagctgaagaagtccgcggggtgatcttacctaagtatgttcaataattcttttgtattttcaatgctgctaaagtggacttggtatgcgcagtacagagtgtaaagaagttggtgtgcaccgagcctagcgccgagttgtcgatggccacgacgataagcttaccactactcagcgctcgccactttctacttttcgagaaacctgctcaatggttctccagtgcactaccatcgttgctgctcaacccgaaattcgattttgcatgctggacgacacagggctatagaatacgtagtaactatccgcttcatccgagctcgaggtgaatcggaatctgttagtgtcgtcgtcggattcagggacgagttccagttctcagccgccaagagacctggtcgatgctccttccagtcggtgaacacagcgacagactccttcacgggcccctcccattgcaacggagagctcagcagcgtcgcgtcttcagctagaggcgcagtatcccaaaatgactccataaagtaatcagccaccactgcgtactccggcatgccggtcatgtgtcgagcctcctgcgcgcagttcgggcagcacacgcagggcgtgtgcggcttgttgttgcccaggaagacgcgcttgcccttaacgcggcacttggagcacactgcgatgccacagatccgacaccaccgaagcttcacacacgagagcaagcccgtccccacgcgcctaatgcaaacagagcacaagccgtgcttcggattgtcctcgtccacgttcaacgcgtcgcgattcttgccggaaacggcattatatcgagccaacagcgtgagcttcttggcctcggcacagctcacagctttagtcaatcctccgacgaacgctgcggtggcgtagggtatcagcgaagcgtagggaatcgacagtccccgtaactcaccagaagtatcgaagacgcctcgaagcacaacgttaactacccctggagcagtgtcacggaatatgcaggagaagaagagcttgccacgcaggactttggccgagtgatcgaatggcggacactcggggatgtccactgagtgcagcacgaggtatccgtacttctcgtcgttggtgtctcgctcgacacacccatggcctggaggtagcaaacgtcgcgcgcctcgatgatcggagccgaggcattgtacagccacttgagtccgaagaaatgcagcgggtcttccggtgtggccagctcgaagatccggaggatagccgagtccgtgcctgcgtccaagaaggacgtcgtggcccgcatctcctcgtagttggtgtccgatagcccatagaacaggttctccacagtgcctgcaatgctgcccgtggcgacaatgctcggttgtctgtcatgtacggcctgcaccgcctcagggaagtcctcctcggccgcaacttcctccagcgagcgaccgcgccgtctccacctgtagattttcagctcatcgtacgaccgcacgtacttccagtctgcgggtgggagacacggcagtttgttcgccctccgctcaatgtagtggcgttcgtcctccagcagcgcgtcgagtctccgctgtattagcgactcgtactcgatcctctgcgcagacgtgacctgaacgtggccgaagtagtttttcggcagcgggaagctcaccttggacgagggcatggccagagcgtatcaagttgacaagtgaccagcaagatctggcggcgtggcgcgaaaagcttgcgtgtccagccacgcgagtcgatgagtgcacgctcggcagacgggaaccacacgttctgacctctgcacacgcacgcggcgccctggcactgacgtagcgctgtcagcagtgcgtcgatggctccgttaaactagtgctggtgcttcgtggcgaccgagtcgcacccagcactgcttggtgcaggttgaagtgcaggtccagatgacggccacgccacgttgcgattcactcgctggtccgggacgactgtcgttcgggtggatggcaggtccaagtgatacatgttccccgcccgagggcagaactctgcagatcggcgagccgtcgcctgcgatcgtgaagatgaagttgttgaagtctccacacacgtcacagattgggtctaactacatgttactctgctacatactcgcagcttatatttcctgcctaccgaagtcttctagactgcgttcgctgcatctcgcgcatgaccgagttgttctgctgtacctggctgccgatggacgcggctcggcgcagcagcagcgccaaggcgtccgacgtggacttgacctcaacctccacgatctcctcctcgtacgggggctcgcgccactgctgcactgcttcaacgtcgagcgcgtagtcgtcgtcctcttctgcgctcgagctgaacccgttcacgtcgctcagcgtggacgcgtagccgtccatgaagtcgcgccccacccagctctcgtccaccgtcgcgtccgtggggcgctctggcgattcctctcgcacagcatcggcgattgtggagcccgcgtcggtcttctcgtcgccccaccactcactttcgtcgatctccgaggcgctaagtgagaccatgtactgctgctgagccacggcggcgtccagagcgccggagtacgactcgagcgctggtccgtggaggtaaaagtccgcgacgacggaatactcgggctcacacggccgcatgcccgtcatctgctgcgcttcgagcgcacagttcggacagcacacggcgaaggcgcagggccgctcggacccgaggaataaccgcttgttcttggccgagcacttggagcagatcgccacgccgcagacgcggcacgcgcgcagacgcgtcgacgagaacaggcccttgctgcgcttgatgcagacggagcacacggcgtccttggcgaaggcctcaccctggttcactgcgtccagattgaagccagagaccgcgttgtgccgtgacagcagcgtcagcttcttggcctccgcgcactggacgcccctgaggattccagagacgaacgacatggacgcgagcggcacggcgtgtctaggtagatccccggacaagtcgaagacgccgcgcaccatgatatccacgaaacccggcgtcgtctcgcggaacagcccggcgaagaacatctcgccgcggatgatatcattcctcctgcggtcgaacggaggacactgtagaatatccaccgagtgcagcactagatagccgaactgccggttgtgcgcgtcctgctccacccccatcgcctccaggtaacacgcgtctcgaggcgtaacgatcgcttgcagcggcatcttcttgagcacccatcggagtcctaggaaatgcagcgggtcgtccggcgcgtccagttccagcacgcgcagcaacgcgcagtcggtaggctcgtgcatgtaggccatggtggtctgcgcctcctcctgcgtgatgctgaagctgccgtagagtaagtcctcaatggagccgggcactctacccaacgcgataatactagggtcgggtagactgccggtcctcgctcgggtgttctgtgcgtgcccccgctttcgccgcctgaacattttcacttcgccttgcgaccgaacgaacttccagtgggtcgggtcgagtcgcggttcgtgcgccgctttgcgcgcggcatagagttcttcgtctgccaggagctcgccgactctccgacgcaccagcgctcggtactcttcagtctgctcgatggagacgttcacctggccgaaatggtcttttgggagcgggaatttgacgctcgaggcggtggaagcccccgactccgagtgactcgactgcatgatggcggacacgctggtgagactcgatcgggcgctgggactcggaggttgcatgcaatgagcggaaggggggggggtctccacagttctcgaaattctggaacgggttctcaaattcttggatccgggactttgagtctgggaggggccgacgtcagagcagagggaagttggcaagtgctggtcgaccggaccaagcgtttgaggcaggaaggatgtgcaagcagcagcagagagatagtgcctcggcaaggtgcagggttggcggcgtgctcacagacggcatggtctccggaaaaacacttttcgccatcccaccgtgcttttaacatacctgcgaaactggatgatcgtaagactcgattttattattgacatactgtatactatatacacattgaaacagaatattcatgttgtgtatagcgataacttgcgtaaatcgatatgcaaatcgtcaaccagggccgacccacaggtttcttaggttgctgcgtggttttacgccggttcacaagccgaagctgaccccggccagctgctgctctggccgagcctgcagggcacgcaagccgaggccgagagcgtgccgcaaagccaccggcctctgtaaacgagcgatgcatgcgttggcttcaacttgcggttgcattcaagggccccactcagctcctgtacatgtacgtaccccatgcatggcctgactcaacctgctcatctactcagattccggttcgctgctgtactgtgtatctggcagaccaccagcagccgcggcaaaaacgcggtcgagctcagcgacatcgtccgcctccttactcgcctaatgcatacgtgtacggtatcatacaatgtagcgtctccaaacgtcagttcgtcatgtacctgctccgatatgtagtttttcgaccgaaaacgtcgaccattgaggtgagatggagatattttctgcttggtgttgagcgccaggcttttgctgggggcacgcggtaggtttaggggtgtcaacgtttggtcccaactcgaaactcagcgatccatcccgccgaactacctccaaactcttctttatccccttctaacctgttaaaacagttgtggtccacagaggactcgccattatcaaagccgtctcatggaagagaacactaataacttgagtccacttgtttgtatctacagattcaagggctgacaaggcacgccgtagtcgccctacatgctggtccagcggacgctgctgcagcggcgttgacaagacgctgcgcatccccacacattgctctgtgtaatccgcctctaggttccaacaacttcctcgtgaccggtgtcatggccttcgtggcgcgtgtggggctgtgtgtccccgccatcggtggctccgtgggcttggagtgcgcggccatcttcgatcacgagcactggatcacggcagggtggcgctgggcgaccacggacagcatggacaagttcattcggcttgatgcacaggaccagcgcttcgccttgctgcgcaaccacaagaacggtgtctgcgtgctgggcttgcttgacggagagctgatcacgggctctacagggaagccgctggactgcgtctgctggagtccatgtcgcgtagcacgatgcggactgagctacaacgaagtggcgatgatggagctgagtggacgccaccatcgcgtccgtggccactacgctctactcggaccagcagaacccgctcaagaagaaggacgaggccgtcggcgtgacctcgacggtagtcaaatggacgcacgatcccgtctcgacctctgtatgcgccaccgcgcacacggccctcaacgtcaaggactacatgaccgagaaggtggcctcggccacgtcggccatgtacggcaccgtggccgactacaccaagacccaggtggtgcacgccttgtcgtcgacgtacggcactgttaagggtgtgaccttcatggcgctgagctacgtgctcggcctcaagatcgtggtgctagtcgacggagacagcggctggtggtcggcatagacggcgttgcctggggcgaattcggtgatggcagcagtcagcgaagttgtcaaaggagaggaagttgtactctatggactattactcgttgccggggggcgtgatctttgctgatggcgaagtcgctagtgatggagtggtggtttcgttactgctggtccaactggtgctgatgtagcgtaaggaatgccatctaggaaaaatgaatcgaggaattgctgacagcattaaatgtattggtgaattacttgctttggttgacttgttcgtgactcgggtcgctcgttgctttttcgtccgtctcccactctggaaactcgaagttatcgtggatgaaaagtgaatcccggacaagtgaagggtccagcttggtccgcttacaatttacaatgttgcctgcagatgaaaacgctcgctccgacggcaccgaggtagcgacacatgccagccattgtcttgccagtggagccagataaggatacgagcgaccatgcagccgccaccactccaggggatctgcatcaaactctgtatcagcgacctcgtcgagatagcgataaacttcagcgctgcagcgcgttttgagacgtttttcgcgagcagctgcactagcttgagcgtcacgacgaactctcttgccaaaaacaccttcaacggccgtcgtccgttgcttcttgggaatcgaagagccctgagaagcgttgctgtctttatcgggttgtggggactgggactgattcaaattctcctgttttgccagtgcaattgcagcatcgatgaggcctgtggtagcttccttgcactggtcattggtgagtccctccatattggtcaaccttggaaccagataagatatccaaagcaaatcggttggcagatctgcaaaacgcctttcaaaaaggcccacgaaagcaagtcgaacggttgtcatgaggtctaggacagtctgcttgaatggcgcgtcctccaccagtaatgcttcttcatcaaacaagtcatctctgttcagcgtcctctcaacctggcgaagacagggaaatgccagtgcaagtgtcggatagccctgcccacctagcagctcggatgtcgctgcgatggggtcaagcagtgcgatcaggcacttaatcgtgaaccagtccttggcgtctggccggaagagcttcggcatccgctgaaactccttcttccccttcgccgtcttgagatgacgaaaaaaacctttcagtggctgctttagctcgatcattcgcgccaacatatccctcgcgctattccaacgcgtagggcagtctgtcaccacttttaacggctgtcttgctcgggcgtgcaattcatcttcgcctgtccgatattcagcaattagacgcttctgtatcgcattgaggcaggaggttgctttttgcgaagagtggaagtaagttgccagacttcgaaatcgctgcacgagatcccggacttcgtctagcgcgtagagctgttccataacgtgccactgacgtagaaaatcagccaaatcttgaattgaccggtcttgttcccacggctcagcttccgtatcagcacgcttcgtatcgtcctcgcagggcactgccacttgctccacaattgcaggaggcgctggaaagactggaccgacaggtccccctgcaactccggggggtgctggaaggactagaacggcaggaactactgcaacgcctggaggtgttgttgctgctagagctgctgcagctccacccatgcgttgtggagattccggtgcacgctccgtcaccagccctgaactgtttgctacacctgaagcctttcgtgtacgcttgatgagcgcacctccgacgacaagatgcagtgaatgcgcgatgcacgacatgtgcggaacgcccatgagattgccagccaacaccccgtttgaagcaccgtctcgaactagctttatgcagaaagatggatctagtccccagcgtttaaagagcttggtcaatccttccgcaatagcctcaccgctatgaaggcctggaaatcgctcaatctcgagagtccaattacagggtcgaaactttaggtcgaaatagtgaagggtcagcgacacgtagccctccgtagtcagactcgtccaaatatccgttgtcaccgcgtaatagcggcagccttccttgatcattcccttcaactctgcacggagctcgaccgctaactgcacgatgtccacgcgaacttgagttcgcccaggaactttcaacgagatcccacccagtgtttcagtgatgtatctgacgtaaaatgcgagtccttcgtcctcaactatcacgaatggccgcatattttttgcgatccataacgcgagatactgtcgcccgccgctgttgttctggagtcacggccacaacccgctttttttcgaaggtgtcgagtgaggggcgccactggcaatggtaaccttggcgtctttggcggtttttttcttctcctcacagtctcgaaggtatgcagggtgatgaacctgcagatgcattttaacgtggcttcgtcccttttcaaagtgaacctcagcgctgcacttcgcacagtaggcggcacgagcatgtttattacccggcttgtgtagatgctcgaactcggggcgtggcaccaacttgatgaacttgtaccagtaggggttgtgggctccggagatgtcgtaggcatttgatggcaccggacaggtttgtagctcaggttcagcagtctcctcctcctcctcactctcgataaccgtctccacaggtgctgtcgttggagacgcctcaccgcgaggccccttggatgctgtgccctggtccctagccgaagaatgcttcggcagtggcgatagcatgaatcgaagctgaactggtggccgcttggttcccttagctttcttcctcttctttttattcttggccggaaaaagacgacgggatgtatcgcttggcgacgagggcacctcagagatggccatggtgtccgtgagtcttgtccgagtatgcgcttggggccttgttgcgctatggcccgcgaccgcctcatcgacctctgctccgcccgcactggtccattttgtcttgtttgaattactagaccttatgcttctggtagtatggaaattccattttttggaacaaagcagcgggaaaatccaacaagcttggagggaaaaatatactgcttcgagtatcgagaaagatttcgaagagttgggcggagttgcgccatactcaaactccaacttgcaacgttcgagttggagcgagttggagcgagttggagggacccaaaggtcccaacgttgacatccccaggtaggatacgacgccttacgggcacgatgaccagcatcagctgggtgggtcgtcacggtcacactgaatggtccgtcaagccaactcaagcggctgctgggcgcacttcaacatagaagcactccttcccctaaaattgtcggagaaattcggcgttgcgcgcgcaatttcactttcgcgtcgggcgcccgcacggctgcaggtcgttttcagggacattagctgcctctccgccaaatcaaacgaccgtcgaagaagcgcgcttggtggcgctcgactggaaccgtcaccgagtttcgagcctcgaacattgggtcgaagtgccgaagtgaagtgcacatcgtgacggagtgccgccttcgtctctattgttgcgtgccggatgttgtgtctcgctatgggtgattgcgagcgccagcagagcctcgccgcagtgatcgccttggcgcagcgtgagccaagctccggagacggcttaacagctgactcaatccgctgccctgcagccagatgtgcccgatacgcaagtataactaacggtaatctcctggctaaggtctgagtgtacatgtataatactgtacactaactacctgcgctctgcttgcattgcactcctttggtcgatgcaatgcaaatgcgccgaccaattcaagcaaggaaagcctcgattcgctcctgaggttgacggccagctcggacaagaccctgactcacaacgtgccggtctaatacaccgactcagaacgaaagcaagatgtgtttcgtgttgttgccggggtcttagacccgacgctcgagcccaagtgtaacgcgcgtgcccaacttctagccgtcgctgctgtcaagcaggaacagccatgccgagattcacaaggctgaagtctgcatagaagcaggaaactcgctgcttgccaagtgctcggcggattttcaacacgtgcatagcctccgctggtccacccaccagacgatccgcagcctgaccggcaacagcagcagcaggagaacctgcagcccgcgttacatgtgcgtcttaccaggcgtcaacctttgcttccgctgtggctctgccccacttgccaaccggagcaggagctgcaaataggcacgcgatggcagagcccgtacggcgagcgacagcgccggtgccggtggccccaacccaagatgatgcatccattcacacttctcttccgaggcgcgcgacggccccggaggattccgacgcacgcaggaacagataccggttcacactcctggaaactaaggcgtcatcaatgccattgccattgccattggtacgagagacgacctccgtgtcgtcgtcacaggcgacgctggagcccggcaacgtcgaggggttccgccatctagcacacagcatcgtgtctagaacgctggcacttgagtgcgagtacgaccggatggggagaccgcagcaagacgagcacgtctggaagctgctcaagcgacagaaccgcctgcgggtctacaaacgcaaggtgcagcccacggatcacctggaccagagtcgaatgggaggctcgtcgaatagtaaaccgacggtgatctgcgtcggctctgtggaggggacggtggaggacattctctacggagtccacgccaagacgcgcagcgagatgggggccacgatgctcttcatggacaggaacccactcgactgcgacgtgctgtcagtgctggacagcgggtcgaagcaagacccgttccgtcaactctcaatcaagtatcttctagctgagaccttcggcgatacgcgcgtggtgaacgaccgagacgtctgcgtcctcgagtccatgggcttcggccacgactcacggggccagcgctacggctactacctcctacgaagcgtggacgtccccgagtgctccccgttaccggaggacagcggcgtggtgcgagccagcatcaccatgtgctgcatctacagacaagcccagggctccgtcaaggtctacagcaaggcctcgatcgacttgggcgggtctctgcctgcgttcatggccaacgacgcggctacggagatcctgctgtcgactgcagaggccacagccagcgccacctccaagcgtctcactgctctcgcgctccagaaccagttcaataggaagacccaggagtccgaagacctcacgtcctcgtccgagtcggagctgctgctcaccagctctcgatgcgcattctcgtacaactttcgcagtgccaagtccgtctccacaatggagtcgtctcgtaccgatgacgagcgcaagacgaccgtcaagatgcccgtcaaaccctgtagtgtatgcggcaagaagcccaagatggccaagctcgtgcgctccacacaccgcaattgcggcgtatgcagccagtgcgtctgcaccaagtgctgcgtcaagcagaaactaatcgcgcgctccgaacccgtccccatcgtctgctgtatggtctgcctgctcgcagccaaacagctcaaggtggatccgcgcgacctgttcccgatgctaccatgaacgtagtagtagtagacccaaagtgcaatgttatcaatataagtcatgtcctgcccgtcaacttggcttacttcgtctgtctgtagtatcaacttactagtaagtaagaggttctatccagaccgcaccgataggccttttaacaattgcgatcttctatctactactttccttgttcaggttgatcttgcatttataggaagctatcaatacagtcgctcgtcatcttctatcgctttgaactgacgggcccctgtaaccttgaactcgccgcagttttcttatgccccagacgtcattaggattcttcattttattgcatgaatgtacgcagactcctcctgcccgggtaacccgctacttcaaacaccatccacagaacatgtaagcagtcaacactaaaaatgcgaagctcgacccagatggctacatgtagctagagctgcagcgcaccacagtacaacttctacgtgatgtccgctttctcactaatcgggaaagtagctaaccaggaactcaacttttcttttggtggggaatctctattgcaggccttgatgctgtaatataacgtcagccaccgcctcattgcatagcatcacgaatccagcttgaaaaggcgccaaactgcaccatgcgggggcctgataccgtgcgtcgtcgacgtgaacatctccgcgtatccagcttgcaggcaggtagccctagaagctgtggctccacgcgactcagttgttgagtggtcacggccatcgaaacattccttacacttcggtggcgtcgcggcctgcctgcaccccttgaggctctaccgcgtcggagcgtcggcccccagctgtcaaatgtcatacgagagaccgtgaacgagtccatagagagatgcctttcaatgccgtaccacatgggggcttccttcatgtgggcgcaaccagcggggagtggacggtcctgctgcttgcgaatcgcaagttgcgatgaacgtgagctatggagacttgcgactccggctctgggaacttggctggaagctgcgtcgctcgccttcgcctcccgcctcactgtttaatttcagctccgcccgtcgacgcttgtgtctgtgtgtccgttcatcatggcgcccgtccgaagagcaaccgacgactgtcccacaacttcctccaactcaaactctatcgaccgtcgagcgactgccccggaagatcaaggctacgacttcaagcccgtcaatcctcctaagaaggtgacgacccccaagttgaatctctcggacggagaggtggaggcgttcaggcacttggcgcacagcatcgtctcgaagacgctggctcatgagatcgagtaccgtcaactcggttgccccgaaccgaactccaaggagtggaagctgctcaagcgccacgacgacttgagcgtcttcaagcagcgtctccctccttcagagcaagagtcctccaagacgtacaacgtcatgtgcttgggctcgctggaaggcacgctcgaggacgccctctacggcacgcactccaagaaccgcggcgacatgctcgcgactgcagcgtacctacaccgcagtcacatggagtgtgccgtgctcaacgtcctcgagagcgggtcggacgaagacccgtaccgccaggtgtccttgaagtggttcattgccgagatgttcggcgacgcgcggctcgtgaaccaccgcgactggttcaacatcgagtcgatcggtatcaccacagacgcgtttggacaccgctacggctacttcctcgccaaattcgccgaccaccctggctgccctccgatgcccaaagacagcgacgtggtgcgaggcaagatgaacatgtgctgcatctaccgacaggagccgcgctctcgagtcgtcgacgtgtacgccaaagggtccatcgatctgggtggagacttgccggcctttatcaacagcggcgcgtcttgcgccatgatgttcaacatggctgtgtcaatggagagcgccgaagggaagcgcctcaccaagctcgctctcatgcaccaggagaagcgagcgagagagagggacgagaagcttgagttcggcctggagtggtcgcagaaggacacgaccgactcgatggtcgacatgctggctgcgtccatgatctcggcctccactaacagctcttcaagcgacgtcagcacgaaagagtcgaagagttcgcgagagccctgtcacgtctgtgcgaagaagccttccttgtctaaactggtgcgaacctcccaccggaagtgcggcatctgcaaagagcgcgcatgcagcaagtgcaacgtcaagaggaaactgttcggccgcacgggccccgtgaacgtattgtgctgcaagatctgcatcctcgagtccaagaaacttagcgtcgatccacgcgatccgtgcccagtcctccagtaaacgtcagtgaaaaggtgataaaagtccaatagagtcatagttgtattctcatggtcttccctttacttcacgttactgtacgacttgtaaaagttgtggtactgcgtgagaatcgactggaacggctcaggaatcgtcttgcccttcgtcgggtctaacttgaatattctaatgtagactttgtcgggattcaagcctctcatcatccagcgattgaattgcgcggcctgcaagttcggtacgatatttttcgtaccagacaccgcctttgccgcttcgagcatcttggcgagttggtcatccccatacgcttttgtgaaggtcttgatcatcgtcgtttcacgtcccggattcaggtagttgaacaggtgcaagtacgcagcccacgcgtccaggttgacgttgctgagcggattgctcgcagcttggtcgagcttcaagagcttgaagacgtcgtccggcgtgagcttctcgtagcgccagaccttcatctgctgagcctgcagctgcgtcgccctggctttcgtactcgggtcctgcttcgctacttggagcattttagacacgacgtcatcaccgtaagccgtcgtgaacgtcttgatcagacttgtggacttgtctgggtgttggtggctgaagcggctgatgaatttgacgaactcgtttacatttgggtgggtgaggaggctctcgacgccgtcgttaaactttaggagcttgaagacgtcgtcgacggactggcctgagcgcagcaactcgagtgaatttattctttcttcgctgtcggccccttcctcggcgccgacaatcctcagccgccttgcggagaccgtggagtccgtagccgctgaggtggctgccacgactgcgacgacgaccagaagcgccgctataaagtagcgagggaaggcggaattgacaattttcgttgtgcttttctaccgtgaggcaaactgcgaagactggaaatggggagttcctgtggccaagggggaaaacagcgcccaagagcgactgagacacattgaaccatatgccggatcattggaaggtgagatgatccaacagcaattccatacacgacaagcctctttgcagtgatacttaagtattccgaagagtgatttagtacctagataatacatgtcctgagcccagatacagaaatgaacccctagaacataataaaagtaggcattcctcccaattatgataaacagataccggcatcactgtacagggattctaaaaatattcgagaatgtgaagcattctcgagtacttataccgacctttatatagacgccaatctctattgttaaaatattcgagaatgcttcacattctcgaatatttttagaatccctgtacagtgataccggtatctgtttatcataattgggaggaatgcctacttttattatgttctaggggttcatttctgtatcttggctcaggacatgtattatctaggtactaaatcactcttcggaatacttaagtatcactgcaaagaggcttgtcgtgtatggaattgctgttggatcatctcaccttccaatgatccggcatatggttcaatgtgtctcagtcgctcttgggcgctgttttcccccttggccacaggaactcccccttttgttgcatacaagggtgcccgagcactaccctgcacgtacaacaccaaaagtggtcgaggctagctgaaacttagtcatccactggacaacattgtagggagtggttgagagccgtttggggcgtgtgcgcgtcttgggtcgttctttttgctggctcttcgtgcgttcacccatgtatgcaacatctgaggtcatatgaattttaccagtctgttcactttgcttgggacgggtgatgggcagatttgcaagtcttggaaaaatgcatttttcatgcaattcgcctacagagagtagcggcaataagaaagggtcaacaacttataattctgacaacacataaatattgaattacacagggcctctatttaggtactgagtttgtcaaagtgatgtggcacacacatcaatcaaggttcccgcgcatttttcaaactccaaggacggagccacagtggctccgtgtacacgcagtggctcaaccactgcgtgtgcatcaacgaccgttgtgcttcagcgccccagtgctcccgtcacacatactttctcgcccacattgccccgcaaactgccgctaaggaagacaatgagcgcctgcaggttgatgcggaggtgttgtcctacgtgcacatgttgggtttgcacaagctcagcaagcacaccgccgagacgtagctacagtaatgtgcggtggccatggacaagcagggcgtcgtagtgagtcgcagccagtgtatttgaaggtcgtgcgcctcaggaggacgagtacgacgagcctgtagcgtcgaagtccatcgtcaatcgggccaaataataataacgtacctaacgtgtttcatttatttcgttaagtcaatacgtttaaagctccgcaagatttgatttgacttgattattgtatataccttcagtactttaatcgttgaaccctttcttattgccgctactctctatattactacaggataaggaagctttctcccaacttgacattccttgcgcttctctgtcattgcatctatccaatcaggacaagttcttcaatgaatttagccaatcacgatcgattcgtgtgtatcccaacattttcccaattattttgggaatctacagtcttgctagaataatgttcaatacaaaggctaagtataaatgttgcattactcatatttgaccacaaattctcaatacaaatcatgattatttcgttggtggctgtgcctcgtctgctttctctcctctttcatttgaaaagatgcagcggccgccgagagggcttgacatcccgcaagggacagcagggcaggaggcagcggccgccgagagggcttgacatcccgcaaggggcagcaaggcaggaggcagcggcgatgaagtgcttcagcgaattcttagctcttgctaacatggatgaggagtcaattgctagtattgcgaagtcactgcctattcctgatgctctaccaagtcaaaacgtttactctttgctaaccgccttctccattttcttgcaaactaagccaggtgctcgaggaggccgtcttgctaaggctactgttgtggactatatgtcccaagttgtggacctgctccgagagcggtaccctctgtacttgtcagacagcaagcaaattgcgaaaatacgcgacaaaatgggttcaacgattcaggagcgacatttgctagctggcgtgcagactggtgaagctccaggctgcacgctcagcgacttgcgtgttctggtgcaggaaactgcgattaagggggttggctcaggttataagagtttgcatgacgctgctgtactaacgttaatgtggcacacgtttggtcgagcgatcgatacctgttgtgctaggtagagccagctatctatggcggcatcgggggagctgtttctgcatctagctcgaatcaagacttcggtggttcaaggcatctcaatttacaaggctgcgactaactgggagcagtgtatgctgcacggcctcggattgctgttcgccggagcgtcggagccttccagctatgtgttcccgctagtgccgcacgcggcggcatcggatttgccgggggagccaagacgaagttatactctactgggagaaccttgaagagaaagctgaaccaaagaacgagccaccagcaaagcgcgtgagaggaaggcccaatgtgttcaagtatattaacgacgtcatcaccatggtctgcgagcgccaagcccaagcctctgccccgctgcccccgactctcaccgcaggattgagcagccactccttgcgccacggctccgcagcgtacgcgaacgccttacctcagcttgcgacccagtggatctcgacccggggagcttggctgctggactcgctcacgaaggcgttcgcgtacgcgggtaccacaaatcgcgaggaccagagtgtcggcaaagtcctcgctggataccgagacccgcacctgccatgcgtcacgcccacgattgccaccttgagcgagcttcatcctgcgctggagtatgcccactgctaactctgcgtggccagctcttcaagaacgtcagcggcttcacggacaccacgctcaacgtcgacgccttagtcctggatgcggcgcttgcgtccctgctcatccatcttgacgacgtcgcgacggcagtccagcaggagcaggctgctacaggcttcacatcgcattacctgtaccgcttccacaaatctctggacgcaaccaacacagcgctgggagctcggctctcgctggacacatgcattggttggggtcggcagcttcgcacggcttggcaaacggagaacttcgggcagctgggggaacgcagcaatggaaacaccaccgtacttgccgcagccgtcacccagatgctatcgtccgtctcaacaatgcagcgcacacttcagaagctcgtcgcggtccaggagagcaagtccgccagcgcgatggtcctgctccctgtcgctgtgctggcaaggccccacaggcgagcacagacgccgtcgttgaagcgcactctcttgctggctgcttctacaactggtacacgctggagctgtggcacacggcaacccaaaagaaagagcagcttgttcgcgctgacctcaaggcaggcgtcaacatcatgatcatagcagcagggcgagaggtagacctaccaacggtttcgaacgtcgtccattgtgaagcggtggttggagttctcacgaatgtagttgtagatgcttgaagtcccagcgtcggcgtcaaggcatcagagcagagcctgcgggaacctgacgaatacctggataagacctgtatataccgtcggaaatggggtggttatggctgtagacttcgcgtttcatgatgatgcccacgttccatctcggcgcatgacgacttgagctagcatctgaaacggacagtccgtgcggcggagcttgtgcgacgtcctcttccctgtcgacctcttacgctccttccagccgtgtgtgcagatgtacttgcgctgatacggctcccatctgtcgggtacgagcggaatctcggagtctggaagcccttggaagcgaacctgcttattcaagtctgcgttgcagcgagcgacgttaatcacctccgcgatgacgaacttctgtcgcgtcgcttccatggactcctgcaggctgacgtcaagcaggggaaacgagtcatgctgagccttgaacgctggaactagtcaggtcgtcgctgccgctctccgcgctgctgcccttgaggcggctgcaacgacggattgcgagtcatgctgtctatgttgttgctgcggttgctgctgcgttttggcttgctgaatttggggttcacgatggccattttgcgcagcgaaggcaccagaaccgaggaaccagaaggggacaccagaaccgaggaaccaaaactgaggggccagaactgaggaaccagaactgagggaccagaacagaactcttttttttcagcatgagggccaaacggcgtgacccgtgagccgcgggcatcctgcagcgcctgtgatcgctgcgacctgttgcgcgcgctagccaccttcccctcctgccgctctcgctcggccatctgcgccttgatatgggccatcttgggggtgcgtgccatggtgatggggtctccagggccgagcaaccgccgcacgtcgaatgccacgtggctggatttggccccctcgaattggtggctgtgaggcaaaagctgaaatgacggtaataaagcctgggaaatggtgtagtgtaaccataactgtatctagtttcagacaagcttacgatgacataacaccacctcgatagcagtctcgcaggctttctggtgcttcttccgttgctttcgtggctctcgcacgtttggaagcgggcaacccattaccttgcagcaggtagcaacaggtaagcaacagacccgctttctattcagcattccgtacagagcatgttgataccgtacagctgaaagggagacgtacccgcaggacataggcaaccacagcaaattcaagcatctccttattacgttagacgcacccacatgtgaagccatcacaattgacttcctgcatggcctccggtatgacgacttaagaccaccaatcgttgtgacataaccagtaagttactggtagtaccggtagcagggtatgctaagtacgatggtagccaaaagagcgacaacccccccgtttaaacagcggtacgtcccgacacctgacggagagagagagagagagagagagagagagagagagagagagagagagagagagagctccgctgttagcgaccgcgaccacaacgagcgtgtgtttgacaccgccagcctcctccgtgaagcgggggggggggacgaaggtgctgatgatttttgtgtagcactactgagttctattgtttggatgtctccaagcgataggctaggaactgggtgcgatgggaccgccaatgaggcttccgatgttgataatcgtctattgatggagcgaaggtgatccagcgccatgttctctgcgtgctgcaaatacccccgttatggttacaataaactacaggctacacttagaatacatactacacttagactacaggctacagttgggaaatatgatacatgacagagtgcacatgtaatgggcctactttggctcactactttagcttacacgtgtatgtgaggaagcgtagctagtttaaattagagttaattatactcgggcctccgagtatagattaatctaaataaacgatccaaataatgtttttgggttaaatgagaactgctatttttgttttatgtttctgacttccactaaatgtaatattctaagataggaatctgccaacggctggttggcagaattccaatgctatgcatgtcgctcattggctaagagatgctgctctcagccaataggaatcctaagtctctatggaccacccgtcgtggtggtcgtaaatgtatgtagctattggtgtaccttacaccaaggtcgaggaagtctttcgaacctctaacagacgtcgtgtctgttagagttacaagcgactgtagccacttgagcgtgtaaccctgttaccccccccccccctcaaggttagacgcgccgagtcacggcacgtcgatcaggaaattgactattcgtcaattcttcacgttgggagaaagaaaactcgagctcattccgcaatgagctcgcctcagaagaagaccgacgctgaagcagagaggaagtcctccgccaggatagagactctctctatccccgagtaccgcgagcgtctcaaagcaaagcgtgacgctcttgctaccaaggctgcggcggggacaactcaaccaaagattgtcctcgaaggttcttctgtagtcaacgacgccgttgactccgaggacgacgacgtggagatggaagagggcgaggcctcttctagcaagcgcaaggagtctatcgacagcgatagtctcgacccgcatgccgggtcgagacgccctcgtgaaggagacgactcggacgcttcgagctcgaagcgttcgcgcggtgagagcgacactccgctctctgctgctggggctttaagctccccgcgtgaggtggcgccttcaagctctccgcgcgctgctcaggcagcgcgcgatccgtggatgccgtctgcgtcagagatcgcagcccgtgtgggcaacaccgcgcctccaaatgaaattccgctgtacgtatgcagcgggatccacgatgctgctgtggcggaggagcaacactttgatccgttaacgaatcaaaggcgcgattactatatcggactctttcacgagctccgatacttctccagcaagaagatctcttctcgcagcaaagtgcctgagtggcaggcactttgtcaaagttggaatgcttttgttgagaacttcaacaagaagccggctgcttaccgtgagcgggttaagcacgcccgtgagcgcttcgagacattctcgacgtgcgggaggttggagcagctccacagatcttctgtggacgctggtattccatgcgatgtgcccgaaggccaacagtgcacgttgtgtcttccgggtgcggcgcgcttgagcgaccgcgacctaaacgggtacacgacgattcgtgtacctgagagtctcaaggatctccgtgccaagttcctcgcacgagaggaacagcgacgatcgtgggacttcgggagctgtaggtgaccacagcgctcgcactaccttcgggtcggcagtgcgtggtgagcttcgtacgccctcaccatttccggaacgtcctgcagcaggacgtcccgtggctcccatgtatcttggtggggcggaaaccctctccaacgaatacgataaagaactggctgccggttcgttttcgggtttttatggttcacaatacgctcaacaatccagcgtgttgagctgcgggcgtcgcggatcggaggcggcggtggtgggaacacgccccgggtatggtcaacctggggttgacctcggcccgacgctcgaggagcgggtcgctgctgtggaacagcatcagagccgggagtttgccgctctgaagcaggaggcggcgatcctgagggctcaagtcgctcaggcctcgcagactgcgtcggacatctctgtcgacgtgggaggtcgcgtcgcacgcttggcccagcgcgttcacgcgatggagcagaggttcgctcccgctggggcttccgcttcgggtcagccgagctaggtggctcgtgctgccggtatggcttcagccgcctgacgtaaaaggtcgcatggaggcgcatgctagatggaatatctagcgtgtaggcgttgccatgccgtgccaacaccgtgaacggcccgatgaagcgccgacttcgaggcgagcaatctcgctctgaagtcggaaactgcatgtttggcaggttttgagtcgctaacaaaaccaatgaacccttcttgaattcattagtgtttcccctaccaacattatctgcgttcagcttctgtcggtcgacagaagctgcgatagcgtcttggacaaaccgaatgacggcttgtctgcgctgcacgaagttgattgtgtccgagctgaattcgttcagctcgtttctagcagtaggcccggcctctgcgttcgtcttcgcggtgtctgtgccctgcacagacgcgtacttcttcttcttgcgcgtagtcgcggctgacactgtgcaagtgtcagcggcattctgcggctgctgcgttgattctgcggctgctgcgttgcagtcgtagatccccccccacttaaggaaggagccaccatcccgagtagactcgggaggcgtgggtgcctgacggtattcacgtagaacggtgtatgcccggtcgaggcatgcaccgagttgttaatggcgaactccgccatcgggcaggcactcgttccagtgttggaacgagtgagcgtagctcttaagcacgtctacgagcacgcggttcgcgcgcttggtctgcccgtccgtctgcggatggtccgcagtcgacatcgaaagttgactcccaagaagtgtaaacacttcttgccaaaggtgtgcagtgaagcgcgggtcccgatccgacagaatgtcgatcgtgtttgaacaccatgtcaacgaacagacgcgccgtctgcttcgcagtcacttcagcgggtactgcagcaagatgtaccatcttgctgaagcggtcaacaaagaccacaacgcccgtgttcccctggctgtccgggggaagaccgaacacgaagtccaaagacatggactgccaacactcccgtggagttggtagtgactgcaagggagcctgcgcgaaaggcgcagacttcacacgttgacaaacctcgcaaacacggacgtacttgcgcacccatttatactggtgggcccagtagaagtctcgcgtgagaagaaggtatgtcttctcacggcccggatgccccgcagtcggtgcatcgtgatactcatacatgattctgagtcgcaggtcatggtcattgggcacgacaacgcggacggcgttgtcgtcgactgcactgtagagtaataacccgtcgtgcacccggtaacggtgtgcacgagcacgaagatgcttcggcagcttctgacgagcttagtcagaaggcgctgagccgtaggccagcaagagcttcgcgtacgcgcacgacgcgtacgcgaccttcacgtcgtccagcagtgacgacgtcggggtgctcgatcgcatggcgtcaatggcattgacgtcggcatcagtcgtggcgtagtcaggtcgacgcgagaacgcgtcggccaccacattgagtcttccgggtttgtactcaacccggaagttatactctgcaaagagtgagagccatctcgccatccgttgcgagatgtgcggcgacttcacagccgtccgcaacgacgcgtggtgcgtatagaccacgaacggtttgcttccgagtagatacactccgaacttcgcgagtgcgtacttcatggcaaggagctcctggtcatgtaccgggtagttgcgctcagctgacttcagctgacacgattggtagtagacgacacgatcacgaccctcgtgatcgtgctgcatcaacgcacatccgattgcgaagtcggatgcgtcacatacaacgtggaatgggcgatcttggtcggccaccgccaagatcggtgcctcagtcaagccccgcttgactgcatcgaaggcctgctggcactcagcagtccaaactcggcgtccttcttcaggagctgtgacagcgggcgtatcatgcccgcgtagtccttcacgtacttgcacaagtacgtggccaagccaaggaactgccgcagttccttgacgttcgacggcgtcggccactcattgatcactctgaccttctcaggtccagggcgggcaccgttcttcccaacgagacacccgagcacgggtatctcgctcgtcccgaagatacacttcttcaggttcgcatagagcttgtgcttgcgcatgagcgcaagcagcttccggagatgcaccttgtgcatctcaacatcgctcatcccgtccgcagcccggctgtggacgaacacatcgtcgaagtagctcggtccgaagtcgcgcaacaagtgcgccacgcacctgttgaaggtcgcaggggcgttcttcagaccctgcggcatcactagccactcccagaacatgccgctcggcgtgctcacagccgtgagagggatatcgctctcacgcatgaggatctgatagaacccatcgcgcagatcaagagcactgtagatagtgctcctggccatcgaatcgatgataacatcttttcgaggtatcggcgtcttcgccggtatcgtcgcatcgttcagcttgttatacgcatgagcgatgcgccaaccgccctgtggcttcttgacacagaacgtcggagcactgtgcggggatttcgattcccgcacttgtccagctttacgacgactctcaaagaagtcgtcgatcgccttgacctgctctcgcggtcgtggccactgccgcgtgacacagtacttcatccccggcacgagatcaatctcgtgctggatgcccttatcatgcggaagctccgcaggaatctcttccggaagtacgtccgcgtactcccgtaagatctcgtagtagggactcgttgaaaacgagtcccagctctgctcttcaaagcgctccttcttcgtcttcgcactgagagtgtcctcgctctcagtggtggtctccatgaagaactgcctgagtttttcattctcgctcttcgttctctcggcgtccgagagaatgcatatttgctcgatgcgtccatcgtacaagtcacgcgcgaagcgtttccagctcatgactggaagcgaagtcaactccgacgcttgcgtcggagggttagcgagagtcatctccctgtaccggaacccggcacaggtacgcgtcaagacgttcaacgtctcgacgtccggcttctccgcctccgtctgcccggcacacattccttgtagcgtctcggccccaggccgagacttgcgcagcgaccttcgcatgcgccgtcttcttgttttgcggagcccggctccgcttggttcttgacctcgtccaggctcagccgtggacgggtgttcgtcttcagtacccccggcgggtttatcccgcgggcgggcgacttcaagcccggcttggtcgcccggcgcttcgtcgtgcagcagtgctgcacgacagcatgcaagtttttccggtgcgggacgtttgcaatcgtccgcaccacttgcagcgtcgactcccggagccgacacgccatcttcacctcgacgcctgttattggcggagccctccgttacggatgatacgtcggctccccgagccgatgaatcaaattcacccaagccatcgactcccggagtcgaaagccatcgactcccggagtcgacggcgttacgtcaccttggctcttattaatggccagacctgatccaatcagattcgcgtcagcctccacggctgaggcgtgtgactcgcctgcgtcatccgtgccccttgaggccggagactcttcctgattcgctgaaaagcgggtgtcgacctccgaggtcaacacatttccttcattagctgttggcggcaacgccgacgctagctgctcttgcgcgcgtgctcgcgcgcgcccagggcgctccgggacagcggcattaggcgctgtctcgagtggggagtcgcgcgcacctgtcggtgcgtgcgtagcggcaacagggccatcgctcactgttccgctgtcgcgaccgaagcgcacgagagtgcgcttctcccaatcgatgaccagatcatgccgtgcaagccacggcatgcccaatacaatgccaaacttatcgtccagatccaggacgataaaggtctcgacaaactcttgatcttcatacgtgaagcgcacgcgtaccatgcgcttctcggtcttcacgacggcacccgttgccagtcgtacttccaacatacttcgagatatctttaaatcctcgaagtcaagccttgatagacttcgcagtcgaacaaagttcttcgacgcgccataatctaccaaagcacggagagagccgcttgctctcatcaagttcacattcaggatgacaaggtcaggcttgtaatcttggttcttgcagtgatgatgaacctcactgggggctgccgtcctcagtgtcgcgtgtccaaggtcgacacgcggaactgcattaccagtagggcgccccgcgcctactgggttccagcgtttattgtttgtccgcgacgatgcccggcatcgccgggtcgaccaccatctcggtgcacgggtgccgtgcactctcggacatagtgaccgatccttccgcaacagaagcatcgtacattacttccttgttgctgttgataaccaacagccgttgcattcgagaggtccattggttccggacctcccgctatcgcgaccggaggcggttgcagcctcagcgcattcgcatgtagtttagcctgcctcagactaaactcctcctgcatcgcaagagtaatcgcagcttcgagagtacctgggtactcacggaatagataggtctttaaaggcccatctctcagaccctttatgaacgtgacgaccttggtcgcctcgtctatcgggttggtcacaatgttcgagaccaagtaccgtgctctttgcgcgtaagcatggacatcatgcctaccctgctgcaggtcgaggaactccgccctcgaccggaactcgttttgcggtggctcaaacgcttgtctgagctcttccttgaaaccctcgtacgtgctaaagcacgtaggatccgagagtcggcgtccatacgcccaacttctcgctcgtccgccaaggcatgacatggcgaacgcaaccttggacaacgggtcgacgacacgtcgagccgcaatggcagtgtcgagttcgacaagccaacggaagagaagctcgccctctcttccgacgtagttactcacgtttagcttcaacgattgtccacgcggtgtcgtctccgacgcctccgtggtagaggaagcagcatcacgcggctccttcatgatgaaccccagagcaacatagtgttgctctgtcggcgatagcgtacgcagcatcgcagctactgccgcctccccaatgactgttgacagtcgttggagtgcctcccactctggatccgacaggtagaggcagtcagcgcgtgcaacatgagttgcaggcgaggtggagctttcgatgggcacctccgtgctcatgaaaaggttctcgactcctcgtccgtacagctccgtacgaacgttcaggtagtcggtcgttggacggactacaaagtgctacgaggtgtaatgggcctactttggctcactactttagcttacacgtgtgcgcgtgtatgggaggaagcgtagcttagcttaaattagagttaattatactcgggcctccgagtatatattaatccaaataaacgatccaaataatgttttggggttaaaatgagaactgctatttttgttttatgtttctgacttccactaaatgtaatattctaagataggaattctgccaaccagtcgttggcagaattccaatgctatgcatgtcgctcattggctaagagatgctgctctcagccaataagaatcctaagtctctatggaccacgcgtcgtggtggtcgtaaatatatgtagcccttggtgtgtctacaccaaggtcgaggaagtctttcgaacctctaacagacgtcgtggctgtttgagttacaagtgactgtagccacttgtgcgtgtaaccctgttacatcaaccgactgaatggttacgctcgtaatgctggccttcagttcgagaatggtggtcgcgatgcgaaggaccatgtgcagcggttcctcgagacgtgcggtgaccgaagcctcgaacgccggctttgccccgttcggggaaggacattcacgaactcgaggacatgatcaacgacatcttgaagtctgaagagcgtgggcgagaccaaccgcgtcgtcgtgatgaccgtcaccacgaagcttcgcgtgacagttaccgtggcgaccgcgaccgtggatacgaacgtcgccgcgaagactcgcgccatgttccgcgcatttggctagctgaagcttcgctgtcagacttgcccgctgaacggcaagtccgcggtaccaagagtggttgagctgagcgctcgtcgccacgtcgtatcccgtacagcgacagcgagagtgacgccagtgattatcattactccgagagcgatccggtgatggcggctacagtgacgttagcagctctggcgaggaaggagctcacgtcgctgctgcaaatgagcgcgagcgacgccaagcagctgaagaaacgtacgcgcgccctgaccaacgtcaacgcaagggtggtgaacccggccgaggattcgaccggagtaaccgccactccggccgagacaaccgtgatggtcttccgcgtcagtgcggaccgtgcgcagcttgtggtggagccgggcattcggctcgctactgctaccgtcgctgccgactgtgccagcaggtgcatgacatcggcaagtgcgaagcacttcaagccctcacttcgttcagaaaaacgaaggctgagaagaaggacctctcaccagagctccaaagcctagtcttcggtggcaatttaaactaggcagcccgccaactgaaactgggttggtcccaatcgggctgccacaattagctgagcccgcgattgatgcagactgtgtctacgcattcgtgggcgaaagcaaacggccgagcgacaaggacaaggaatgtgtgaaaacgacggaaaatgaaaaggagagagggtaaccctcggtggaggtgtaacaagtgaaatgaatgatgatgaagatgatgaagatgacaccgaggcttgggtcgcaagtgcggtgcaagaaggacaccctggccgaatgcccagtggggtgacgaagttactcccaggcgagaggctggggtggtggtccgagcagaagttcggcaagagagctcggatgagagcactggtcaagggcgcggtgaataacacgcgaacgaggattctattggacactggcgcgaatgttagtgcggtctccgaacggttcgccaagcagttgcggttgcgtgatatccaaggtcacggccgctgtatggaggttaagggttttacgaaaggaaccatggcaaccgagagacgaactctcgtgaaagtaaccctcggctggagcagagtgtacgaattcgaattgtggattatggatcatgacgctggtgtggatgtagtcctcggcaccgacttcatgattcctgcaggagtgcgcttggacttgttccacgcgaccgcgaggttgccggacgaggtgagtattccactcattaagacgctgaacatgctgaatgaccaagatgaaggcccgcacgtcaacggtggtccgtccgaggacctaaccattgagagccgagagttcgcagagtacagagtaccgaggcgtcaaccacctctggatacacacgaggtgtgggtacgtcgcacgaagtctcggttgcctacggtaacgaagtttcggcgaggcaaggtcgagagaatgcggttgacgaacgtgtcgaaacgttttacggtttgccgtgctcactcacctatgctaatgtgggtaccgatcggagatcttccgaagtctgaaggttatgttcgactcagctcggaacggtacgaggactggcagaagttggcgtatgacggaagtcgggatgaaacggtgttcaagcgtgagtgtgatgcatatgcggattggctggcctctcagccttcggctgtggagcgaccggagtatgcagtgccggccggagtgttaccccggccgcccgaggcctcccagacgcacggccaccagctgagttgtgccgagcaatgggaacgtgaagtcgctaagcgtgaggagcaggagcaactcgccaccgacggctcaccagtgggtgatgatccggtggcgctccctcccgcgcacgtggaagccgatgatactagtaccgaaggttcaatcgagtctgagagtgaaggagcttcggatgcccgcatcgatggcgacacctcggacctaggggtgaaagcaagccaagtgccagccgaaccctctgacgtaacggaagatcgttcagactggggtgacagtgatcagtccccggggtccgaagactcagtccaagatgaagactcggcagcagtgctgacacgcaattatctgtcggccgccgccgctgtcgacgttgaggatggagaagctgacgtcgaagctggcaatgcccgagccgaacacttgcccaatgagatcaacttggaagattacgctcatgaactagctttcctgcccgaccttacagaagcctcggtcccggaactggactactcggctgagaatgtccggcacccggaactgagtagaggacggcaggatcgcttagtgaagattctggagaaacatgagaagatcatgatctctagtggcaatgctctaccaccgcctgcgtatggtgtagtgtgcgacatcgatgtacagggccatgcgcctgagcacggaggattcccctccgacacctcaagaagctttacgatcttttgcgaggtttgctcaaggccggtctgatcgcgttctccaacagctcatggtcgtcaccgatcgtgattgtgctgaagaagaatagcgtggatatcagactatgcattgattacaagatggtgaacgcagtcaccgctatcatggagtatgcaatgccccttgtggatgatttgctcacagacctggagaagtatctggggtactgctcgcttgatgcggcgagtgggttctaggcaatcatgatgacacagagggctcgtcagatctctgctttggtgtgtgcactgggtcatttcgagtggctcagaatgccctttgggcttaaaaatgcacctatgatctaccaaagaatgctcgacaacgctctgtgggggtttgttcagccgaagggtggctggaagcattatgcgcgtctgatggcagaagctcgacgcctcgaccgaacagtcacatgaagagtcgtccgacccggaccagtcgcctacaaagtttgaagcgggacttggaatcggatcgagtgaaagctcggtctcggaactaatcaacagtcctattggggacatgtttgcgaatggagagcccggcgagtcttcgttggtgccggttttcgaacggcgttcgttcgttgacgatatttgctttttggcggcgagtctttcgatgcatgtctagcgacgctcgatcgactcctcgccctgttcgaggaatgtcggatcagcgtgagtttcaccaagagcattttcgtgcagcccaaggtggacatcctgtctcacgaagtgtcccggagtggtattagagcggaccctaagaagttgaaggctatcaccgagctgtccttccccaggtccaagaagggagtgcaagtttaccttggcgctctgaactactacagtcgcttcatacaggactttcctgtctatggtgccgcgctctaccagctgcgagaagaagacttcgcaccagggggtgacctctctgcagccaagcgaagcttcgcggcattgcaacgaaaggtcggtgaggcacctgccctccgacacttcgaccgtgaccgagaggtccatgtgacgctgtttgcaaatgagtgggcagtgcgcaccacgctcatgcaggagcacgatggcctgatgcacccggtgcgtttctgcggccgagtgctcaaggacgccgaggtgaactaccacccggcggaaaaggaggtactggctttgctgcagctgttgaaggtgtgttacacccaactggccggtcggaccatacatgtctacacgcggtcttcgacgctcgactgggtccacaagtcgaagacactcttcggacgtacaacgcaatttgccgtcttactgtctccgtggattctagtggtgcaacgagtcaaggaaaaggattgcgccttcgcgcagcttttgcagtcgacgatcacaagcttcgttgacctcgaagactcgttggcaccagtgacccctcgagccaaaggctcgccgagtgttcggatggatccgcatttgctttatgcacggttgctacgtacatacagtggctacgtactttcgtttgatggctcggcgaagaccgataagtatggtggctacgacagttgcgcctggatactacggcgacttcctgaatggagtgtagtgatcgctgtgagtgcgtatctcgagaccacgactgtaaacctcgctgagtacactggaatgaacaacggggtctctgccgccctagaacatggggccgaggacttagtcatcgtcggggactcgagactcgcaatccagcaatccctaggggtgatcgcttgccgtaaggagtacaactgaacaagcacaaggaactgaccacgagacttcggtccgtgaagtacttacatgctatccgagagttcaatgcagctgcagactctttggcgagcgaaaccttagagaagaaggtgtcgatgacggtgaacagcgaaaaccgaaaacgagagttgatggaattgaattggatctgagaagtgctctgtgaaccgtcagccgaagcctctgaagcttctggagaaggcgtaacgcgtcacgggaactcgatatgtgtgatgtatacgcgtgacagtgaccgcagtaagaatgttttcgattttgtacgggatactggacatgtagccgcggtaacgaggcaacaagcccgcgcgcgtgggaaacaagtacgctttgctattgaaacttcgggtgatgaaccagaagaggaaaccgaaggagaccaagctaataatgtcagcaacgaagagtccaacgaacttccagaccaaccgagacctgacgcaacggtggtccatgaaccgagtgctgacgacatcgacccactagtggtgcaggaagaacggcgcaggcgcattggcacagcccaggataaggagctccggtggtcaaacctcaagacggtgctaaagggagaagaagcgcaacttgcctacaaagctgcacgcgaaggctgggagatggctgacaagttcgtgttaagcgaagatggcttgctgtatttccttggtgcgaaccgtcggtggggtcgcgaccgggccgaggagacgacactacgtctagtggtgccaacaacgatggttcaggagatcctacagaactgtcatgactcgtgggagggcggtcaccaaggtatcatccgatcctaccaccgggtcaaggctgactactattggattggcttattcgccgacgtggagaagcacgtacgttcgtgcccggactgtagctcaagcaagagtcgcccgcaactacgtgggtactcgccgggcaacatcttgtccgagcgcccgctacaaattgtctcgatggattttgtgatacccctaccgaagactcggcggggcaattctgcactgttactgttccagtgcgcgttcactggattcgtcatgggcaaggcgatggcggacacatctgcactctgtgtagcacaagcattcgaagagtgcgtgtaccgaaggttcggagcgccgtctctgatcaggcatgaccgagcccgcgcttcatgagcgaggtcttccaaaccttcgccgagatgatgcagttgagatctagggctacgttgagctatcggccacaggctaacggccagcaagaacgctcggtcaagaccgtaatgcaatcggtgcgagtgtacgcggaggacccgctgcaacaagactgggatgagattgtggagaagttgatcttcgcgattaacaactcgcaggacgccacgaggaaggacacacccttttactttgtgctcggatgggacgcaaggcccaccttccgagcaatgtcctcatcactgaagcgaggtgtcgggcgacaatccgatgcgttggcgtggcgccgagaggtcaacaggctacaggaggttgcgttggaaatggctaaagagtaccaagtagtcgagaaagctcgacgtgcgcaaaatcataacgaggctttgagccgagcggaacgtgctgcgcttccaccttctgcgactggtgaaacctcggaagataatccgacaggtgcagagggtgagggtgacacaccagaccccgcaccgaagtctctcttccagcctggtgatcgtgcgtggctttacatggaacgcgtcaagccaggattgaccaagaagttggctcatcgatggcattgtggagttgcgggatcggccaaaatctggttaaggcccgatcgagcttcccaccagcgcccagacaccgactaacggagggggtcccccaacgatccgtgatcggctgaacttgttcccaccttgtgtacccgtcggcgggctggatctgctctctcggggctccgaagatgcagcacttggtgaagatcgaatgtcttggtgtgacgcggggataggttgtggagcagcgcgggaatcttcgctctgcgtccgagtatacgctccgatcgagggttgttcgctccgatcggtcggcctggagtcgatccacggcctgtagttgcctttcctgagttgcttgccgcttcctacagcgggatcgaggtcgattgagagacgcagcgatcgccgggcaagcagtatccggtcgatcgaggacttgcacacgagagaaagatcactagagtaggtcaagctggccaatgtattgatccagtcttaaccgtaccgctagttcactacccgaagtgtcaacgcttgccgaggccaatgcagttcctgggacttgacgagttgagggtacttgtggtcttctgtgcaaattgcgttctgatttatgtttagctggtgtctctctaccgctaccatctcatctaccatcctacaactccacaaccactggattcttgtcctgacttcgttctccatgtgcatcccatcgtggtcgatccccgatccccgatcaacccacgatcgcctcccgatcggcgatcaactctcgatcgacgacttgtgccggttgccgcacgccgccgatccatcatcttccgtcctcggccgtcctagatctgcgagatctgtcgtcgatcggggcttgggttgaccccgaatcacgccacggttcgagcacgatcatccacaatccggcttgccacatgtcctgccttacgcgccggcgtcatcgggccacttgagatctcccaaagaactccctctgatccacagatccttgctgcctgtctctcgatcgctgatctcccatacttccagtcgatcggccctgccgcctttctcagagaacaattcttattcagcacttctccacagcatggtcccttccgcaacaagcagaagggtgacgagtatacgtacgaattggatttgcctgacaagagtggttatcggttctacccggtggtgcatgtgtctcggatgaaggcggtgaacgagtttggcgatcgaccgaagactcgactcgccgctgaggttaccgaggagacgcgactagacttcgacgaggagttactcccggaggatagttgggcacccgaccacctggcgggcgagtatgaggttgaagccatcttggatgaccgaattcgtctctcgacgagcactgagcgagccgtccgagagttcaaggtgaagtgggccggctatgacgaaccctcgcgggagcccgcgtcgaatctgtcttgtggcggactgctgtatgactatctacgcgagaaacgacgtgaccgaaggttgcaaatggtccaagtcgctgacgaggactaggtgcaccactctcacaatgatgaactgccggcagggctacacagcctgacccagcagacgaaacatgttactgcggaaagaagattgtatatttgtatgttgaagtggacaagacttgacgaggtggagatgagaaactatggagaacagctgaagagggacaaacgactactgaattgcatgggcgagctagttatactacgaacgaactgtctgaataccctgatctagctcgacctagacatgaaggaacaatggagaactggaacgaggcttaggcgtccgaagacgaggcaaccttggccaaaacgcggagacgcgcagcctgagaaacatcggcttgcgcgacagattgatcagcaacacttggaggcgaacgtggcgcgtcaaccggagtctcgctgactggggcctcctcaacaggggcctccgaagccgcgacgcgatcttgaaccgagtcctgcgttgccgttgctgcatcttgagctcctagcgcttgtgtagcttcgtccgaagtctcttgagcatccatggcgcggcgagactcgtcctgagcctcttccgaagactcttcagcaatcggagaatcgatctcttcgttcagctcctcgacctcctcctcttccgagacatcgtcctcacctggctgctcttcctcctgcagaccgaaaggaggcccgtgaaagttcgtgaactcacgcacccacggagccgtaacacggcgagtgtccagcactgggttgaccgtaatagctgtcgcgacttcacgaacagtcatgccacgcgggacgaagaggggaaccctggggttacacggagcgaaggttatgttgtacgggtgctcggttggcacatcggtgacgcaccaagccgaccatcagctaagcgaagtttgcgaagcgtcgttccgaatgttcgcggagctcttcgaccgcagcctgcacctcgtggtggacgatgtcttcgacagcgtaccactgcgcagaagaacgcggagggagcccgaagcctaacgcgaagtggcagagagcggatcaccggtgcggcagaagtgcgcagcacttgccgaaggctcgtgcagaggactggagtcgggcgaggacctggggaccagctgagtacacgcagggtccgacgaagccccgctagcgggctgcatagcgggagttggcaacgtcggagccactgcactcgaagccgaggtctatccggtgcttgcagccgaagcatggtgcgcgacgaccgatggtgcggcctggagaccgcccgccactccacgtgctcctgtagaggcgggagttggtgacggagcagctccggcgctgccagcagcaccagacgatggcgctgaagctacaggaactgcagccgaagtctgcggccgtcgggacgccccgcttgctgacgcagaagcgggagttggcaccgccgaagcctccgaggccggcgccgacgagtcgatgacctgccccgtggggccacgcaattgagtgtcctgcagcaagatgcagcaagttgaagacggttagacgcgatgaagagatcaagcacagcactcaagcacctcgcacgaagactcacctggacgactggaccgaggtccgggaaggtgaagggcggcgcgctgccaggaccgccagaggactgcatggcgccggagcgcagagaggcacgaaggcaacacggcactcaccacttgggacggctcgggccgagttgggggccgctgtgagatcgggaaatgactgcggccgggcgagttccggccgaggtctaactgccttgagcttgcgagtgatggctgaccgagggctttgattggtcggtcacattccccgcgctttagtgcccagaaggttgatagagactacggagtgacaggagggtctcggcgggtcaaaataaaccgcctgccgaggcctccgaagtttcatagtgggtacactttatgcccagtaggagttcggattaaggacgaagtttcgtccggttgtaggatcagctcgaaagctcggtccacacttgatatttgtatagaccttagggattagctataggagaggtccgacagcctctaaaccattaaacagagcagaattcccccccccaagccacacaagggtcaagtccgtctacggtaagtcgctaagcttagcgtagggtctggatacactcggctgcacggggtatgtctgccggtgagcataaggtgcattgaccgagtgttcatcctggtaaggccaagagtgagtaggtggccgagtattgggaggtattagagacctctgtgtacagttgtacgtttgactgggtgtgaggcaaggaccccccccccagtgtatttgacttctagccgaggcttcgcccggcgcccctgtaagaggcttcgattggcctggtacccttcctttctgagggaacacagaggtttagtgcgaaagtacgaattacacattgcatcctagccgtagctcgttgctaagggtgctcttatattttaacgaagggtaaacctacctgacccgcaacacacagggaggcacagtccagcccgtataagggatcggacctggtcttcaggtttattatcccgacaatctatcgccgactcttcggagacggcgtgtgttgttggtagggctcgtcttagagacttcggttgatagggcgaggactcgtaaactcgtgttttcctacacgacaataggtaaaataatgttcttggcggcagtcgctaggccccgctatgattttttccgccgtaaatttttcgatggaaaataggcatttggcctgtggttgagcgcgtacaagcaaaacggacttcggttaaccgtttagctggtacctgggagactaaaaatgtttcgatgacttcggatgagtactaaaatattttggtgacaaaattatttccagcaattcgcgcgaagtggccaggtttgtcattatttttgtatttgagtgtttattgttaaagctaacgacatgtacattaattctatttcatgcaggaggcagaagtcggccaattcgtgtgcagcacgacaatgcgagtcctcacgcagcggcttcgagggcagcagttcaactagccgggcaagaacgtccatgggatatccgcatggagtatcagccgcccaagtcgccggacctcaatgttttagacctctcagtcttctccgcgatccagtcggcgcaatatcaacagcctacctacaaggtggacgccctcattgggggtagtactagctgcgttcgggcagttgccgagtcgaacgctggacaaaatcttcgaaacgctccaaaaggtgatggagtgtatcatcaaggctgcgggtgacaacaatttccagctacctcgcgtgagcaagctgtacatcacgagaggaatcataccaagctcaattgcatgtgattccactgtctacgaagccggcaaagtaacattaaaacagttgcaataaaatctaaaatagttcgcccccatcaactgtttacttcttggtttaattcggagctcaccttgattggttgaaattggagcgcgttaaatgtttttcgtgacatatctacttatcagggtaaaaaacctcacttctttaggcgcctgtacgatgctatccctacctcgccagcgttcagataagcgttgaatacgatcgcccagtcgtgtaaattgaccacgtatgcgctttgtctattatcgccaaatattgacgaagatgcgcaaaaaaaccttattcactgcgtatgagcgtgttcaaagttagtgttatttcgctcaaattgcttgttattgagctttaaaaaatacagtggggagcagcgtgagcccggctttattttaaggccctgcttgcgtataagatgcacgaacaggctgagatacgacgtcgggaacgagttgttgtttcttaggtggtccagagaagtacaagcgtgtttgtggagtttactgtactctgacacaaaaaatgttgcccctcgtcgcgcttaaaagtggtgtggccttggagaatctcttacttaattactataaatttgttgcgtgggcttgtgcatgcagtcagggtgcgtggaccgatgccaacatctcctgtacacgtaggttacatcaagtaagtacagacgaaccccccagtagtggcaccgggtttcggatgggattttaaagggaaatgtgtccacccttacaaaagtactgttatatagacaaaatcagctatcgacttgatcggggtaagcgaataaccaggtgccactactggggggttcgtctgtacatgggtactttttgttatacagcctgtactgtattcatgtactgtacctaggtatgtgtactaagagcctgttcgctacgtagctggagatggagacgaaaaccaaaagtgtgaccggattggtcaaagtaggtagcacataacaagacaactaaagatggcactgtgaattcgtctccagctctttgaggtggagaggggcggatctacctagagatttacagggccaggcacaacatgggagacgaagatgcaattgtcctcgctgcgtgctccgccgtggcacaggctgtggctttgtatgcagcattttccatgccgcagtaagctgcttggggctcctcgttccctgaaaccaatctctcatggtatcgtagcgaagccgcaacagcacttcggccgctctcggtgtccaggcaaacgacggcttgacgttagaagctcctttcagacgagacttgcgtcggccctgtgctgcttgcggtgcggccgaggcttgcagaccctcgagcatgcgagatggagcgggagtaggctctggcgtagcagacatcgccactgatacttgagctagcggaacagatgtggacgcagtctcggcgccttctagcagcagaccttcatcaccggcaggtggtgtcagcgagacgaggggctcggacgctggcgtttcgtcatgacgtgcggggggcgcaggaaccgaagagccttggtcagcggcatgtgccgcacgcgtggccgcactggtgaggcgagtcggcattttctcaagtggggaggggagccatcccatatctgtcctgtgattggcttaaaatttgtctggagatggatacatagcgaacgaactgtaggtggagatcaagcatcatctccatctctagtacatcgcgaacaggctctaagtaccgcagtcgttacagcacagataactacaacaggacgaaaagaagttatatgcgccgtaagcctacggcgtatataacttctcactgtgtcgatccacttaaatacgctctctatgaggcgaggccgatgaaacctttgtcgcccaggggggttcgtatagcgcagcccaagactgttccccaggggtagacccagagaatcgacttgagagtcaacagcaagaagatagacccagagattcgcagccgcaaagctttaaaccctgagaatcacactccttggttggcgtgggtaccttgtgtaatccctgtcggctcgtttgtcttcgacggaacggcactccaccggttgaaaatgtagcttcaaagaagtgcgggagcgcacgtctacttcagaacgcacctccacaccaaaaggcaaacccagagaatcagatcccctggaacccagaatatcactaattcagggtccaggatttcagtcaactctgggacttggaactcagaagacgccttacccaatgccctcctagctcgataaaaccaacaaatacagagtatacaaacactacaactagccgtcacttattcttttggacccttggaccgtgggtcacacagactaggctcactcgaatctgaaattcaggggcctagttcccctgagactaacccaaacgcgcaccacctccaataaaggaggaaaatacgatcactatcagttaccttcccttcacacaagccgtcaatacaaaaatcctggaggcgactacctagcaccccagaataccctctggaataatatgaaatgggctaccacgagcacagcaagtgacccaactaggatatggaatagatggatcaccccaggaagctcaaggccgtcgctggtcaccacctaactggacttgagtttgatggagcccacacagacggctgtccttcgccgttgatgtgcccttagcgtcccgcggtcgtagtctcgggtcctccggatttccgtcggcaggcttggccgaagtcacttgcgcagtacagggtaaaaggaactctgtttggtttttatcagctacttctctctctctctctctctctctctctctctctctctctctctctctctctctctctcttcttcgggcaaatatcttctgttcactatgcttggggtcaaaatgtcttgtcttgagtataccttgggatcagcggtccaaacttgcgatcggcttgcgaatccattgtcgcacggcgtcgaaagtgccaatagtgggtccttagacttggtttagtatgatgcaggactccctctcgactcctcgaaagtatccagtctgtgcatccatgacggttcttcaaggtcacgcatcgttttgattgcagactggcttcgaactgactcgaatccctgaaaatcaggtgacactcagggtcatcttctgaaatcccgggaattccgaagaatcttggggaactgtagggattcttggatgttggcttgggaaacactttaattcagtatggagagtctggattcttgatccaaacccagagaatcatcttggaactctgggtcacctgtactcagggaggtgaactctgggtcatcgtgcgacactctgggtttccgtgcagcactatgggtaacaagtctgctacattgcaggcctgcgtgcatctccacaaagccacacttttagcgggttgagcggcctcctgcgcatgatcacggcggtagtgggttgattctcagggtagtttgaccctctggggcactctgagccacagcaagatgaggtgtactctgggatacgtactccagagacactttccgccagtctttaggcactcatcgtaagggaaagtccgcggctggactgagtgttctctgaaattctgggcgtgcactcccaggattcacacttccagccagttgggcccatctgcggtcagacgctggattcatcccgagaaatcacttctctcccacaatcgccatccatgtcacacgggtacagccgcgccgtatccaagtcatccaccaatcagcatccgatacaaaccccaggtcacagaggtgacggcacatcgtcggcaattttctggggaccgcctcgtgtcatctatccgccgttgattttgtcattccggatatcgcgctgcaggtagctcgtcggtgcgaggaagcgtgctgttgcggcacggttgcgaggctagaagctgcggtagggcggggggagagaggagggctgttgcgtttgtgtgtaggcagcataatgagccatgcagactctagtagtaaatgtatttcttctcgaaaactgatagagctgcatctcccatctccttgcgctcgacgcacgtgtagcggaggcggtctcccagcacccacgcgttcctccttgcgccacgccagaagcctcagtgctgcctaacagctctgtcagacggaagccttaaggctacccgggcttcgtcttgcctgtcaaaaagataagcatctttggtatgcgtttgatgcattacctgcaaacgcaaagcaatactagcattaattgggcgcagtagtgagcggttgcgaggccgcgtagccgcatgtattgcggctgtatgcctgcgtgggatgcctgcaaagcagggcagtgcggtgcatgtattcgcggaggcgatccaggccgttgcgctagcttttctactacagaagtcggggagtgcagagctctgtcgcgataaaatataccagtatatgcagacatagatatcgtcgcagatggacactagatgtatgcacgctcaggttggccgcagccatcaagacgctactaaggttctctgaaaatgtagagatccagacgggatatctgcgccgtactggtgtgtgcccgtacataaagtgattatatgtgccatagcgagttatctgcgccgtatcaatatcgtgttgtcgtagttatctgtgccgtaacgagagtctactaagtacagtaattagttgacatgtgaaccgtatgttttgacttcctcatgatgattggttcagctccatccccgacagatccccgatcggattcacttgcaaacagcagtttgatccttggattccatcggacagaaaacgagacgtctcgagtcaagatgagtctacaggcaatttcctagcttgtaatacatgtgtgactggcattttattcttgaaaagggggaaccaagccacacaaatacagttcaaatagagagtagttactctctgtttgagagctgtacagtcagcacgtgctccacactaaacgtttcgctatctaagtccttacgcactaaaaatgactgaacttagtacgtgctgggttggtgataatgccactattttatgaagcaggtaggttaacttcgtgaaaaaatagtaatatctgatgagactagggctcagcgcgacgctgagtaggcgcgtcagggtattgggggatttagaaatgatagggcgcacccgttgcgctcgcggagctcgctgcactacttgcagcgcggggccaaatattttatatagtcgggccctgcgggacccttccaagtgcgtattttaggccagtgaaattgttgttgcgtgacggacccggaaactaagggggaatacatgtacgcagaaaccttcgccgtgatgcatatttcatcttttcgtgtgttcatgtttattttaatgttgaacataccgcaagtctgagctaagaggcggctttgccatcagatagcaatagtgcttcttataatgcagcaaaaagttgggtcttttaaaatggtaggtgctatgtgagcgttttttagacaatgtatagcccatgttttcggattggatggggtgaaacggccttaaatcttggttcagacatgttttccatgtttggaaagcttagttggtctctaagccctaccagccttttttagatttgtcactgtcggcgcgatggagcaagacgttccacgccgcgttaagctggaggctactgctttttccgcagccacgggacatcaaagcagattggaagcaacaacataaaaccattttgctactatggagagttcatacagcaattgtgttccatgctacatggcgtctacgcaacgatatccattttgaggaagcagcaacagagcaaccaagcactcaaggtttgatgagctcatttcaccgacattgtcaatacatgttcctgcattctgaagagctgaaactggacggtgatgcaataaactcggtgcttcagcgacttgggtttgatgcacccaaaccaattagtttaccccaacagggttgtcgaatttaaattccgcggccataattgagttgtccaagtagatattaccatggcttaccgtacctagcgaaaccgcatgtccactatctagttaatcaactttttcttcttccagccttttttagatttgtctggtcaatctcgtacttcgaatatactacacaattctgcccgaataaggaacgggtgtacaacgaatagcctcacatatttaatattattttccagtcgatgtggcgatagggggatgtggaaggtactgaggtgaaaaatccagtgccaatcatcagctctccaccctcgtttgaaaaatggggcgcatttagcgatcttactagacttcaaactacatgtaccgtagtggtagactcgcacttttgcttttgcacctcgctccacaagcccacctcctcccccactccacccatttgacagcgctgttgtggtgcgtggatgcctggtcaaaggttagtgcttcgaccatacgccactgttggcatcatcccggactcgtaggtaaagctgctcttcagttcattttgaaataactaaatcagtacattggaaaagtatactcaacttaacatcaatttatatattctgcgtctttatatttatcaggcgttccttactcgggcagattactgtataactatttggagagtgtgatcgtttttatcacctttgcaccatatggtcctacggcagtcgtgcaaggatgcgtccgatttgctttttgcccgagaattgcaggcaccaacgcgtggtgcgctcacttcctgttcattccgcaacttcctctccaatcgccagtgggcggccaagcgactatcaaactgaatcattatgcgtcttcgcttagttgcgttgacggttgtggccaccctgctgtcgactggtaatgcagactcgacccccacgtatggtcgcaagggtgtggttgctttgggcgcacaccgaggcgacactaccggcgcgaggcttctgaggggtgtcgagaacgagaacgaagatgacgcaagcgacgaagaccggttgtatctccccggactcgaaactgtgtccaactacatttggtccctctctggacccaaggtcacctccaagacgatcgacggctggctcaagaagggcgagtccacggacgacgtattccgtctactgaagctcgacaaggctggatacaaccttcttaccagccccaagctggagatctggctcacctaggcggagccgttcaaccgccggaacccgggtaacgaagccaccatgtccaacatattcagaaaggcctacggcgacgagaagctggcgaagatccagcaaactgccaagggggttaaggaaacggaatcgctggcgaaggcgctgcaggtccagcagtttaagcagtggatcgacgaacggatgaatccgaagtacgtcttcagctcagtgttcaagctgtcgaccgactagaaatccgaccccgccgcgattatcgcgcaccagttcaaccagttctacaagcccacgaagaaggtgaaggcactggcagcggcagcggctagaaggggttagaagtagctaacactattcagtcaagtcgcgaatttgatatttgccgaagaattcccagctttttatccatacgatgctgtagtttttccttacttctaagtgtgacgcctgttcgggttttcatcattttagcatcaagaggtgtcaggtaaacatacagtaaaattatggttacatttaagtacttccttcctacgcagtacttcgtagtgtaaattcgtaaattcttcgggttggttgtcgtgcagatgttctctatacattagacggacggatccggacatctagtataggacagagtatcggaaagaacccccagggatcaccagcagaacgagacaccgataagaacaaggtatgatcaccaccaggattttaatggccaaaagccacataaaatcgaaaactactacatactagatattctctataaagaacttcagaaagctttcaaaaaagagaattggacatctggtacgtttatcagacacgtattttgtacaagaaaccttaagcgaataagtagcgctggtgatcattgcaaggattccggtggtagtagatggctaccgcatttggtttcgctgcgaaagagatgagttgctgcgtactatatggataggagtagtccgactattttcttttgttgtttgaataccgttctcgccctattaaagtccggactttatgttatagtacaggcctagaagctcgagattatcagatattttattagctctaaaacttatatcttggagtttgtaagttcaaaccgttaagtactggtatttcttgcgataggctaatattggggagggggcttatattcgggcgagtacgttattaggatgccgctgacgggcccagtgttcaggacaatgcagtactgagggtccaccatatgcattatcgttaattattctgttccatctactgcatcaatctgtgtacgtgagtatgggggaactcatcctgatggctgatgaaaagtttatcgcgcagatccggatagtttttttcttcttctgatcttctagagagaaagtttattattgtgcctttctgccaaaacgccctccgatttgaggtcctacgtaggactcttgctcctacgtaagacctcataaaagttagtaccaaggccagtaaaaccgtgcataaacaataactgaatgtaaactgagcgaattgcttgcgatgggaggccaacaaattgtgcacagtaccgttatcagaggtcggaaaaaatagtgcaatacaataaataatcagttttttcaatattattttttattattgggctacagtggtccccgtacaatattaaattggcccaattattggactcctatagtttttgtacaaagcttcctgttgatggcgtcatctccagcctccgatgacatcaaaaacggcgttaaccacaccacatttcgccctaggcaaatgactggcttggagacgtgctccaaccaactccgcagcctgtaaatacggctccactggcagttcatatctccatttccacaggatagcaatggtcgccaacaagcaactcgccgcattcttctacacctcgcgtggccaaggcctcttcagctgcaacttatgtaaccgcgtgcgcaaacagttggctgggtcaggttactccaatctggtggcacacctggcatcgaagcacgctgactacgaggcaacgtacgcatcgctccaggccagctcggaccgacctcttcaagcgttcggcttcgtcgcaggtgaagccagccatctcttccaatgggtccgttggatcatcgaacgcaacatgcgcgtccacgaagtcgaagatgcactatctcgggccatcagcaagctccgacctgtgaccgccaaggccgtcaagaagtgcatggaggggatcgcaattaaagtcggcgagaagctggggaaagagatgggaacgctcttcgccctgatgtttgacggctggacccacgctggcattcactatgttgctctctacgccgtctacgagacagcttgtaagctgcgcataccgctacttggtatgtctccccttgaagatggcgatcagacggcagacgcccacatcaagctgttcaagaacatcttggatgtgtacgaccagaccagcgacatggtggggtttctggtgggggacgactgcgcaactaaccagtccattgcaaccaagatgggtatccccctcgtcggctgcgccagtcatcgtttcaacctggctgtgagcaagttcgcggagccgtatggggacttactggacgaagtcaacagccttacggtggaacttcgtcatgaaaacaaccgtgccgagctgaagaagtacaccgatctcgtccctatcaagcggaacgtcacgcgttggtcctcgacgtttacaatggtggagaggtacattcgtattcgcgcagagatcaagacggtcaacgccgtggaggaaatggtcccaaccggcgggaagcaccggaagttggtcgcgctgtttgagcacctcaagaagttcgagagcgtctgtaagcggcttcagcgcgaggacaccgatatgggagagatacgcctgatgttcgactccctcatcgcggagtaccctgtcatgtcagagcatctgaagtcgaccgccaagatcgtccatacgcctgcattcgaatcgggtgttgtcaaggtcatctctggcacggctctatcgtccgcggagacagcagctttggagcggttcgagcaggcacaacccacaggaaagaagcgcaaggagcgggaagaagactacacgacgatgttgctccaaggcaagggaaagaagaggaaacaagcgccaagtaccacacgctacatgccgctcgtgaaaatggttcctccgacgtcaaacacggtcgagcggcttttctctcagtgcaagctggtattgacaccgcaccgtcgatctatgcttccggccaacttcgagcagcttgcgtttctccaggtcaacggcggcatgtgggacgtttccacagtagcccgagttagcaagcagcagggtagctaaactagcagaggccttgatagtggggagcgttctagctacataagtcaataagaccatccctaacattgaagtttacactcctcatatttttagaattttttaaaattatgacacgacactaatgctgtattttcaatccaagtcaaatcgtagttatgtaaccaattatgtccgcttttcaacgcaggtattcccagcctcgacagaggcatattgatgaagaagatgcatttcatatcgagtgtatgcctatcttgacctgtatccccctataaaaagatatggtcggcccgaaataaataattatagatcaattcttgtttatcttcaacttacctttggtgagtgtaaatatatactgccttgaaatactcctacaatagctagccaattagcacgcacttcaacacacgtctaccttagattcttggcttagctagctatgcacttgggaaaaacaaagatgccgaagaagggcaagaggctcaagcaaattgccgctctcgcggcagctaagcgggcacgcgaccggcaggcacgccaccaagctcttccagcccctcttgaagttctccgacaagaatcgctgtcgacgccatggtgctgtccacgtccagccgtggacgagagtgatacgacttcgttagaagacaacttatccgacttcggcgaaggtcccaatctctacacagtagacgcgatctacgcgaaaaaaactaatccagcaggtgccgcttattattttgttggctgggtgggctatgcggagctaacatggcagcccgcagttgacctgcctcaaactctcatcagtgagtttgaacgtgctgcgcttggtgtaagctagccggtcgattaccgagcggtgattccaattggggttcctaccggcaccagtggcaggggtagacttgccaggcgcaccatataaattgcaatataaattgcgggaatttttattattgtttgctaagaaattgcagtttttattagtgcttcgtgtcaggtgcaatccaatatgatactgtattggcggacctctgaccgttatacctgtagcacatgtacccgtacgtagctccacgctggcatggtgacctagctgcggtgctgcctgagtctccgcctgtactagtgtggccaaactatgcatttgtcacagatgctgtcaggcacactgacgtgatctaggcctacgaagggctcgttagtcctacgaagacccgaatggccagcttaacatggccattcggtccttatttccaaaacggtaccctttagatgaagacggagctcctacgtaggacttccgtaatccgatgcagggtcagcagcaaatcctaggtttaaccctaccctctccttcttaagaccacctttttgaggtgagattggccaaagtttctgaaatgcacaatacatgtattgggggggggggttaagaggtcctctatttatgtttatcgagaaactatagagtcctggaatcgctgtagggtgctccgaatcgaatgatgatccagcattgccttttcgctactactggtcttcatatcggtctctaacctgatggtaccggtaaagtgttgaggaatatcttctctctggagcactgcgtcggaatgtcttgccaattggcgtgatttcaccaaagctttacggcttttcgtggtccttccgtaagctgttttcgtatcagcatccctatacccgggactggcggcactgaacgactgggcgtagccgaaaaggtgccttgaactgtaagtcgaactgtcgaccataaggtgcgttgtgccaactggttcagcgcacgatcaagagacagggatgttaagagttcttttatgctgtgctgctatcgcagaccaaataggattatatccgtggtacatcaagtcaaacgatgactcctcttgacatctaactggtacattttcttgaaaccggtacgtctccggtgccgcactgggccctccaaaagctttatatgcgtgggcagatcgcaccggtaggatactcatcacagggacgggcttatcatcgagtaatcgtggcggttcgtcaaggaccgcaaaaaaaggggttcgtcgaggatttgcataacagagtaggttcagcgagggcatcacgacggaagtccaccgtgaggacttcggtcgtccatcaagtttctttacgtgttagttagtgctgtagctctgaatcacgttgcacctaggcgtctatcggcatgctgccggagacgttcagcgcataataataccgtggctggggaggtcatgctggacacgttcacgggtgacttgcggtacccgtggagctgcgaggctggacaaacgggaatgaagcggcgccaattgctcttccgagagcatggcaaggaacagatcgagcgatagcgggtgctgtgcgtcacagcacagcacacaatgaccacaagcacgacatctttgctagataggttgctatgatacaaggcagaacaacgtatatctgtacttctaatttgatgttgcgctcaccatattatcgttctgtcagtccgttaggaactcaagcgtgtcaccgagacagccgcggcgagaacagatctgatctatcgagtttgcattagcagcgacgtccagtactgcgacggcatcctgggcgatgccggccacatccgggctttacctcaactaaacccagacacgataagccgcccaccatcttccccctcagccgtcgccgggacctacgctactctactatgcctgtcacagggtatagtatgccgtccacttgcagcgtcggctgttcactgtaaaccgcggcatttacaactttcaggacatattacaggctttcagaagcacggtatttctaaaaatacgtagtgaaaaacacgtagcgctgatacgtgtttttgactacgggttttccgttgtggtcggctgttcagcgatacggaaaataaaaaaaccgtggcaaaactacgtagcgtggaatcttccgagtgcacgcaacgttttaagctggaatctcggctcaacaaactttagctgtgagcgccgtcattcggcgaacacatcggcagcgcctacgcccacgcgccatcgctgggccaacgtagatctacagtatagtgaagtaaagtaaaaattgttcagttttttaattaatgccttcttactgttagccatgtttattccgtgccttcgacgaatctgttggtgttgcatccaccatgagcacgtgtctcggttgtctgcagcgtcttcatctaatttacctgcgtgtgttgtaagtttcgatttgtaaagttttttgtgggtccatgatagtttggtctactcgctttctggcgtatgatgctcgatacttccagcatgcctagagttggcaccggaattgatagcaacgaaatcgacgcctcaccaagttcaagaaatggatgcatactttattgggggttgcatgatggtttcctggcatttgtagctgtattggacccaatacggcgcgtcggctgtggtctcttcaaaccccaggtaggtttggacggcgctgctcgccccttgccttgatttagggcggcggaggagcctaccggtcgcccacgctggtccttggatggcaagtgggcagatggggtcttgacaggtcgatagcaacagataacggagtacacacacaaggtaaggtcgccaacgaggagcactcggcctctaacagacggcacatgcgcccacgaccaactatttgtcacccagcccccccccccctaacgaagaagcttaggcatgctgcttccttacggatatttcgatttaattaccccgtagcggacccccctctcacgggtttacgggatcggaaaacacgtagcgtccccgtgccaaaaatacatcggatcgctacgtgtttttcgctacgtgtttttgccaaaaacacgtgcttctgaaagcctctatcgggcgtgcatcttggcgggtcgctgaagcacgagctggccgtcggagctggcatggtcgaggagcgctatcaggtacttgttcaagagtagtcgaggctattatatgtattcctgtgagcggccgtctgccgatttgtagtgtacaccagaaaaaactaggacactcgtacgtcacggcgatgcgtggaagacaaccaacgctgcattccgcacctgtgctcgccttcacgcaccgctataagcgcattctctcgcttcgtaccagcagcaacagtggaaattacatagaacgggattgaaacataattacataattcttcgtattctagcggcatgcccagagtggttttatgcagaggagaagtgtgaagcatgagtggcattctatgccgttaaactcacaatccgcgatcggtagacccacggtaagaaacttggtcggtggctacttattagtaggcgtaacctcaatgttattatttgttcatacttgtataatggtggctggggatgtatcactaacctgcgtaaaatggtttcgttataggcggcacaggttgttacactgttaaccgactacctgtactcgatgtagttcagcgcattacaagtttgtagtttgatcagttaggcggggggggggggatcccactcacagcggtggtaatcgtgcctaccagcctacgtgaatagtcgacctcttaacacaaggctaccaacctcactatatgcacgcaatatattgcttgcaaagagcgtcgtaggttacttggccttggaaggtatactaaatttgcgggcccgtctttcgcgcacttggcggcgacgacaacaccaggccaccaaacacaagtgcatggctccgctaatcgggcccagcgcgacagcgccgatggagaagacgcacgacgaggtcaatgccgactagatggagcacaatctacgccgctatgcgtatgtagtggatgccagcgatttacacttggtctctgaactctgcgcaggagtcaccgctttcttatctaacctcaggccatgcagtatctgcacgtcgtcccagaactaactctcgaagtctcatttgcacgaagagctgcatgcagcccatcgggtactgagcaagcctagcaatttgtaagcatggtctttttgacttgatttatcgtcaatttcagaaaagccctcgatgaaccaccgttttcaaatcgccttgctgaaccgcctcattttccttgatgaaaagccccacccctcatcacactggtatgacccggtgccacactggccactccaaaaggtttatatgcgtgagcagatcgaaccggtgcactaccgacaacactggtatgaatcagtatgtctaggtacgtacgaacgaaatgaagctaagcctgaaggtcagaatttggatttttctacccaaggttcgcatttttaatattgtaaagttgccggtagacagtttgaactggcaaatttccgggcagatgctgcggctgcgaagcataaccgttgctaataagaaaaatataataaaaataaaaagacggggtttgcggagcgctagttgagttttctttaatgctcttttatattaaaagaagttgcaccacagtcattttttctgttattattgggttacaaatattactcgttttaagtatctcaagctgtaactcggtaaaactagcttcaccaccgcgtcataagactgccttcaaaaactaacgcaaagtccttacgtttaacaggtcattcgagtacccttcgtccagcaccaccaccatctggtagatgtagactgtccatggcccataataaaataaaatatagaagatttcaatgcccaagaaaaagaagattttcacttaatataaacgttcttttaacacccctgtcaagagatttagcaaagctgtcgtctccatcttgtgcttcattcatgtgtacaaagcccactgcttcgatttcagttgggtagccgcccaacagaatccacgctcctctcctactcttgccatccacaacgcatctgccatataggaggagataccagtcgatctgaaggattggttgctgtgaagacagcatagcattagaccccacgaaaaccttgcgcttgcgtacgtgtcccaccatatgtgctcgatagtctcttgctgatgctgacaaaattggtatgaaaatcgcctatttgagggccagccggctcaaagttcttgtgtagattcgataggctgtccgaatatacgtcaaaactccgtcatgcagccatatttgtttaggctgctgcatttgagctgttcgacacgatgcgtgtgcagtcgcgcctgctgccattttgtcgagaacatgctcgaccgagaagtttggctatcgttgcaaccttttcgatcgcgactttcgaatagtttatcgaagacctcgcgcagttgtagatcgtggtagagtccacggcgtagggtgcagatggggtgttggtgggtgctaattaatatcacgtgcccaaacactgactcacctgttgctgaccttttttgtaggaatgcctgttgctaatatcttagcgcaccttaactggtacgcatttgctggtaccactactgtagaggtagctagcaaaccctccgatgatctgtaagcatcagagggtcgagccgttttaaggtcgttaggaacgctaaatgactgtagtgcacctcagcttaccactaaacgaatgcccgttgctaggactaggtcggttccaacagaaagttagtgctgaatagaagcaacagggggttgaatgaatagctgttgtgttgggagtgcagtcagtggttgagcttccttcaaagcttggcaacttaaagttcccgagtgtcaagtgcactgtcccgctgtattatgctggttaacaccaagtacatcagcctaattaataagctactgtagcgagctgtgctgtgtgttgttcggcacatatattttgagatcaccatcgtaatggacagagccttagcggcagtcttcaccagtggtcggaaaacaaatatggcaatacagtaaataattggttttccaataaaaagctttattattgaacgccccgggttccaatacggatgggttatctatcaacccagccacagactgagtccgggacccggtctctacgtgattggacccagttgaggacctgggggtaataacagccagttgtattttagccaatcacatgcatctggactgaacagaggtcaaagccgcatatccgctctgcagcacaagccaccaagctccgatgagatgccatagaggcttctgggcttatgccggtgaagccagcgctgagatctctgacagcgctgcccggtttgcgcggaagcaagccgcccaagatgcacctggagcgaacgaagccgcgcaagactggttgcgaactcgcgcaggaagaggtttgcgctcgctgtggctggcggaagaaccgccgcgtcgacagacatacattctcaacaacgctgacgacaccttcccgctggaagactacccaaaaggcatcgtggatggccgcaaggaccgtcggtgatacccttggatggtgcgtgcagacgtatcgacgccgcaggttgtgcacgaagcttcggcggcagtgcaggccggcaatagctccaacgaccaggacagtactgtggataaagcgctggatacgtaccgaggggagctggtgcgtaccgcactcgccgccgaggttaccgcactcgctcgagcgattagagggggcgcgattgaagacgttgtgagccaggcagcggctatagtggaatgcatgggagcgcagatcgcgtcagagctgtatccatcggcccggtagcgggtcgtcggcatctctagtgatgtggctgcttatgtacgggctgctacgacacagatgaaaatgtacaccgatgctgaggtgagcgcagccattgcggacagcgtgatgagggttcgtagcgccgatcaagcgctctgcagttacattcgtagcgccatgcactcagaccccaaattgaagactacgtatcaagaacgtgagaagtatcgtgctgtcagtactgttcacctgaatcactgttactggctggctactgtacccaggttgagtgtagtgcgtgcagccaagacgacgtacctacatgtggagagcctaccgcaatcgaggcaactccgtatacgggcgattttgcacggaaacgacaacgagttattgagcacgaacaagacctcgatactgccgtcggtcaagttcgaattgtgaacaaatttagcggagctcgtggtacccgattggttagtggtgttattggggatgcggctagtgaagttggtacacgcattagtggtgaagccaatgtacatatggccagtgctgaggaggagaggagtagcggcgatgtggacaatgagtgccataacgaagcaagtgctagtgacgaagtgaacagtgagaaccatgatgacgcaagtgctagtggcaatgggagcaatgaatacgtggatgaaaagagaagatgtgggcagtgatagcgtgcatgacgaggacgatagcgatgatgcgaacggaaagagtgcacattacgaggagggattcgagggtgacaaatatcaaagctcggaatcagaaagctcaatctgttccgacggtagtgtatacgaggaaacgagcgagaaaggaccagcctccgcccccagtgtacccaaccgtcgcgttttgaggcagcgcaagtcgcacgatgatgcgctgttcgtttgagtggacttccagggttcgagagacgctaaaagcttccggttttaccgcaaggacttggatagcttgctgccactttctttcatgacgtcgatggccattgactactttatctatcgggacatggtcaagcaagatgggttggtatgttgttacggggccacactctacttgtcgatggaggtggcccgatatacactgaaaccgcaaaaaaacgccgcttgctcaaaactctgattgagcaattcgactggaaacgttatcgctacatgctggttcccgtatccggccgcatgcattggagcctcctcgtaattgaaaatccgctgcattcggcgccgccgaaggtgcatcatatctactcgctgcgaagggctcatagttccgcctacgccttcgatgtcaccaagtggtttctgtctaaccttcacgaaaaggaatttgacgcatttgaatggaagacttttgtcttcaacacgaagccacagcaatcaaacagtgtggattgtggactatacctgcttcattacatggatgtaatctcgaagcacgtagcggcagccgaaccacaatccattgaggacaaattgggtgaatgcatatcgacagactttaacgctacaaaagctgcttcttaccgctccaagctccacagcagagtcgcacgtgggcctcaacagggtaagtaagatgtttaaaacaatatacgtaatttgcatctatcgagacctcgcatgtgatcctcatcacagctcttttgcctcaaaaactaccacctcgcctaagcggcagctaaaccgcgaagtcacacttaggtagctaccctgcggtacctacactgcggcacctaccgggaagtcatactacggtacctaccgcgaagtcacactgcggtagctatgtcacactgcggtagttacactgcggcacctaccgcaaagtcacaatgttgagagttgtatttaccgctataatttatctcaagcgcgcagttatcgcgtatgaccgcggctgtgcttggtgttaaacgtcctagtctcgtactccgagctcatgtgcaattgcagttacattttgagacacccaattgagcgatttttttcgaatacagcggatgctgtcaacacgcgaaatcgcctcttcgactgcctgataattgtcgaacgcctcgtgattgcaaacccagctagcgatggtctttacaagatcaataatttttcgtcgtcggttgaagaagcgtctctcgtgatggccacaccacttggtaccgagctgttgctccagcttttcaactgcataaccaccagggaggccacatgtccattcggtccgcaactcacgaaccgattgaatgccccgactgagtctgtaactggtaatcgcagaggggtcactcggtgtaccgctacctgtgctagctccggaggcggcttgggtggcgctgggggttgtcgattgtaagccattcacgatcttaacttccacaaatgctgatccattcttgagtggggcaagaacttccatgacatccgctacactttcaccaaccgtgtccaggctgtttcgaataccactcaatgatgctctcatatcctgtcgaacaccatcgagcgtcgacttcagcgcgggcatggctttctcaagctgacgttcggtggggccactaacgtggttcatggcattcttcatttccagctgaaattgtttaaaatcatcgctcctgaagatctcattgttccagatcggatgtcccggcatttgctcggacaaaatggtagcatcctgcagaattacggtgcgcagatactgaagcagctcgagaaaaccaccagccgcgattgactgttcacattcacctgaaatcatcttcgactgccactcctccaccaacggaaaatttctgaagagcttgaagaggatcaacgcaagtacgcgtcagaaaataactacctcttcctggttcaaagcccgcaagcgttcgcattgcttctcgcgggagcgaggtgaggtaacatttcaccatcgcctgggtattccacctccctaggcgccgtatctgagcttcactggcacctccaaggtctgccattcgggagcccgatcctctgcctagatgtgttttggccctgctgcgtagaccgatgtggtcaagcgcgtcaacaatagccgcctgatgaaccttgtacgccattggcttggttggatctttcccggttttttggcagttttataggataccattgttccgacttcgtgaaatcaggaaacgactctttatccacatgccatcgccaaaacatatagaatcccagcaatccatgaccacaaacctccagtttcttactgcgcatacatgcacccacttcaatacgaccaacttggttggttctcccttgtgtcatgaccatcaccagcgcccgacaaacactgtagccttcattttccagtacaatcgagtgaagatcagctagctccgtcatccgagtgtggtattggaaagtagcagtttccaacgctgttgacccgccagcccgacaatcaggttcaatccaggggcgatcaaggcgaggtcaagcgagagacggagatggctgcttctgtttggatgatgacattatcctcggtagagtgacaggcagtggccgaagcctcatcgggtcctaatagaaccccgaacgaggcttcatggtaccaacttttaggtacagatgcatttagttacgtacttcggccccacttattagtgtagccgcggtcgtcatttgatgtgtccggaatcgccttaatgcgatcgttcacactagatatttgtatagggacataggacgcatcataggatgaccagaacgaggcccccagggcctcagaaaactcagtaataaaaagacagtcttccccaaaagccaacaagggtcaagtccgacttcggtaagtgtagctagcttattgtagtgcctggacacgctcggctgcgtgtggatgcatgtccgggagcttatcgtgcattgaccgagagtttccttggtagcgaaaagagttggcgtggccggagaggcaggaacggtattagagtatcgttcggtatatatttgtgggattagagtatccctgagtgtattagtctacctaccgaggttttaccttggtccccctgtataaggcctaacacgccggtacccttcttttctgagggactgcagtggggttgcgcgaaagcgctacatagtatcctagccttagctcgtggctagtggtacaggtatttgggttgaccgaagacaacctaaggtgcacagaggcgcttgcaaccgacccggtgtaagggatcgttcctggtcttcaggttttgatccaataagcgcttaccttttgcgggttagcgtgttgttggtgtctctaatatcttttggttgaggaggattttagtggaattaccacaccacaactggtgctgcgactcgggattggtgtgaccttctgtgtgtctaggttgttgtaggtctttacccccaacgagcgaagaggagaagaagaagaagaagagagaagatggcggagggagtcaagtcagcggtaccagcaacgccggccaagtcgagtggaacgcgcaacgagacttcggtgcgctccggaagctcattctcgaccccaacgacggatcggatggagtcgattgacgtgcgttcggtgagctacgacacggcgattgattcctcggacgccaaagaagatgactgggatgtccggacagcgatgtccgagacttcggaagctgtggttgtgtcggcaggtcgcagcgtaggatcaaggtccattacctgcgacctctccgacacgttcatgtcctacgacacggatgacggcgccaccgaggacttcaaaccctcggtgacggtaggaggggcaacctccatactcgtcctcccctcaacggggatactccggcggccaacaaggtcctaggccggtgcctagacctgatgaagaccaagagcgaatggatgcagttgttctccccgaagcaagtcagccaggccatctggatggacctcggaggggcgttggctacgccgatcaactcaacgagcactcggcacgttgcgcagaatactgtggacctcctgcgagctatggggtgcgagccccatatcctccccacggaggctgcgctcgcgagttggacgccgaccgccgctgccacggcgttaaccaagtggaggaaaaagctgcgtaacgcctttggagtggcggacatcagttcgcgaggcccaacaatgcttcgttcgacttcggaggcagtagacccgtcgatggtcccgctaccagcgacccctcggaagggagccactctttgcaaccaaaggcgaagcctcgccgtacatgcaagactcgcacatggtaactccacgatctacggaccgtagtgaacgtctggctagggagaacgagtcttcattcgccacgcctggcaggcgcggagcgaccggtcgtcggtcgggccgacgttacgacctccataatgattcgtcggacagcgacgacgacctcgggcccgactactacgaaggggacctaccgagcgaatgggcacgtcaggtgcgcgagctaagcgcgaccgacaaccagagctcaaccccaaagctcgagatcgccacgcatttgcctctcgccaacatcaagccgttctacggaacgcgcgacaagagcgagcactccatgcagtggctccgaacgtccatctataaaatgaagggaacgcatgcaccacccaacgagtggtgtatgccgttcgaacttaagctcagggatggagccctgtactgatgtcaccagctcccgcgcaagacaagacgcacgtggaagttgccgagcgaggcgttcatcaagtactattgctcgaagttttcccactctgcgaaggctcggtactactcggccaagcgggaagacaaggaacacgtttgtgactacctcaaccggctcaacggctacgctggcaacaccggtgtgcaatttgaaaacggtggtcgtgacgcgaaagcccacgtggaccacttcttggtcacgtgtgacgaccgaaacttagaagaccgtctgtgccacgtccgggtcaagaccatccatgacctcgaagacatgatcaacgacatcctgcgtcacggtgaccgcaaatcgaaccgagaatcgtcgttccaccgctgtcggagtcaagatgatggacgtcgacgcgatgcgaggtcgaacgaggattctcgtggtggctaccgccgcgaacgacgctaccacgacgaagaccgtcgcgaacgacgtcgccgtgacaacgaccgccgcaacgaccgcagtgaagacgaccgtcgccgtgaccgacgcgatggatcgccgtaccagtcccgagtcactttggttgacgcgctggccgatgtgatggcggaatggaacgtcggaggctcggtcggtgcacgcaacgaggctccatacgccccccgacgtgatgctgaggcgaacgagggttacttcgagggtgagctccattactcggacgaccaacgctcggacgaggattcagacgctaattacgactcggatgggtctaccggacatgtcgctgctgctaacgatgctgagcgtagggccgcagccgaaggaacgttcgctcggtctgataagcgacgcttcaggaacggaggaggcccgtccaaccgtgaacgagatggtcgacgcctgtatgagccgtgtgccgcgtgcggaagcccgtcccactcggtgcacttctgctaccggtggtgcaaactgtgcaaacaggtgcaggacgctgggaagtgtgaagcactccacgagctcaccaagctcctgaagtccaaggtcaacaagaaggatctgtcgccagagctgcaaagcctggtgtatggaagccatttaaactaggcagcccgccaactgaaactgggttggtcccaatcgggctgccacagttagctgagcctgctgttaatgcggactatctgttcgcgttcacgggcgacagcaaacggcctgacgacctgaagaacaatgaacgtgtgaaaccgacggaaaatgaagagaaccgggacgcaagtctcgttgcgattggtattgatgaagatgatgatgatgaacgtgatggacacccgaccgaggctttgatcacaagtctagcccagataagggggccacctcggaatctcgttcggccggtgaaatcactgcacggtgagagacttgggtggtggtcgccccaacgatacgacaagaggaagcgaatgagggctttggtcaatggcgcagtggacgacgcgcgaacgaggatactccttgacactggagcgaatgttagcgtgatttctgccagcgtcgccaagcggatacgtgtgcgagaagtccggggccacggacgaagtctcgaagtccgcggcatcaacccaggggtgatggagacccggcgacgggcgctcgtcaagatcaccctcgggtgggagcaggtctacgaatttgaaatgtggataatggatcacagtgccggggtggatgtggtccttgggatggacttcatgatcccggctggaatccggctggatctatttcatggcaccgcacgccttacggacgaggtcatggtaccactgcttaagtcgcagagtgctcaagatgacgaaccttacgacacgcagccttcgtgtgggccgatcgaggatttatacgtacccggtcgcgagtggcgagagtttcgacttccgcggccagcggctacctcgttcggagtacgatgtgtgggtacgacgcacgggcaagctcgtgccgacggtaacgaggtttcgacgggggcagcggacgtggatacggctcaccaatattacgaccacagtggcacagtgcgccaagcatgactccgtggtgctgtgggtaccgcatggcgaactaccgcgagagaccggctacgcgaggttggactctaacaagtacaaagtgtggcaggtgttggcctattcaacgagtcgtgatgagactctgcaaggacgagaacgtcgtctctacgagcaatggttggctgaacagccgcctgcggtcgagcgctgaacttacccgacgccgcgaaagatcctgctgaggccaccggatgcaccgccatggccagaaggccgtcaacaagctccgttggatgatgagtactcgtcacccgatgtacatggctacgacgacgaccccagggttagtgaaggctcggtcgatgtcgctcgagctgatacaaccgatgtggatcgtgctggcgggtcgaacgatggttcggacgacgaggccagcacgtcgtatgactcggacgtacccggagactcgccgcctagccgagcgggttgccagcccgtgaatccgtacagtggtgctgactccaccggccagggagcgacatacgcgcatcggaagccagtgatgagctaagtgatggtgacagcgtgacgaacgacggttcggagaatgaccgcgacgtggtagcagtggccgagacaactacatgggatgtcctgccaacagggaccgctgcgtccagcctggagccagaggaaacgtcggttgcggtgtgtagtagcgaagtcgactggggtgaacacgacccagggcctaacgatgttcctactgaagccggaacttccaccgctgacgccgacactgaattccatgattcggatctaagtgcgatcgacgaccccgagcagctactggaggcgacctatatctcggtcatgcatgccatggttgcagaagggtctggcgaaggtgatgacaccgtgaacgacgtttcggagcacgtcgcgaacgatattgagcttaccgactacgcgcaagagctggcgttcttgccggacctaaccgaagcatcggagacgacgctggactactcggagcaaaacgtccagagtgacgaactcagcgtgaagcagcagacggccctggtcgatgtgctgaagagccacgagaagatcatgattgcgagcggtaacgccctgccgcctccagcctacggggtcgtgtgtgatatcaatgtacaggggcacgcgccaatcaagcagaaggctcggcggaccacgcttcgcttcctcggtaagctgtacgaattgctgaagggtctgttgaaggccgggcttatctccttctcggacagcccatgggcgtcggcaatcgtcatcgtcctgaagaagaatggggtggatatccgcctgtgtatcgactacaaactcgttaatgcgatcaacgagattatggagtacgccatgcccctggtggatgacttgctgacggacatggaggcgtacttgtgattttgctcgcttgacgccgctagcggcttctgggccattatgatgaccgaacgagctcggaagatctctgttttcgtctgcgcactggggcacttcgaatggttgcgtatgcctttcggcctgaagaacgcaccgatgatctatcaacacatgattgacaacgcgctttggggcttcgtccaaccgacgggaggatggtttaaattctcggtgcgcatgcgtctagccgaagaacatgacaaggaagctcatgctggggtgaacgaggcttcgactggcacggcaaagccattccggaccaagttcgaggccgaccgagacaactcgcttggtaagggagctgtagccgaactggtcaacagccctatcgccgacatgttcgccaacggggagcccgatgactcctcgttgacaccagtattcagtcgccggtcattcgtggatgatatctggttcggtgccgagactttcgagtcgtgcttggcgacgctagaccgattgctggcacggtttgaagagtgccgtattagtatcagcttcacgaagagcatctttgtgcagtccaaagtagacttcctgtcccacgaagtctcggcagaatgtatccgaccggacgctaagaagctggctggggtggccgagcttccgttcccgtcaacgaggaaaggaatgcagtcattccttggggcactcaactatttcagtcgcttcatccaagacttcgcgatctatggagcagcgctgtaccagcttaaggacgaggacttccagcccgggggtgacctcaccgcggttaagcacagcttcgcgatgctccaacagaaggtttcggcagcaccgatactacgacacttcgaccggaagaaggaaatgttgttcgccaacgagtgggctcaaagtttcacgttgatgcaagaggacgagggcaaactacaccccgttcgcttctgcggacgtgttttgaaggatgctaagatgaattatcacccggccgagaaagaggtcctcgcgcttctgctgatactgaaggtgtgttatactcaactcgttggacagcgaatccgggtctacactcggttttcgacactcgactgggtccacaagtccaagacattgttcggtcgggctacccagtttgcgtcttgctgtcgccgtggcacctgttggtcgaacgagtcaaagaaaccgactgttcgtttgctcagctacttcaagccggcttgacgaactttgttgacttggataagtcactggcgttggtcacaccccggacacgacggtcaccaactgctcgtttggacccgcatctgctctacgtacgcctacggcggtcctaccgaggcttcgttatgtcgtttgacgggtctgcgaagaccgagaagaacggtggatacggcagttgctcgtggatattatggaaactaccagagtggacagtagtgcttgctgcgagcgcttaccccgagaacaccacggtcaacctcgctgagtacatcgggatgaacaacggcgtctctgctacattacagcatggagccgacgatctagttgtcgtcggcgactcgaggctcgcgatccagcaagccctaggggtgatagcctgtcggaaggagtcattgctgcaacaactcagccaccaccaagaactcacggccaagcttcggtcggtgaagtacctgcatgtggtgagaaagtttaacgctgcggtcgactgtctggcaagcgagactctcgagtgcaaggagtctacggtggtatcgtcggacgaccgagtattagaaccgtatcgctgaagtcatctacgaggctgctaacgggtgcgtcgtcgaggacataccctcggccaacaaagtatgggccgtggtagcttctgctaaacctcgtagcaagaattctttcgattttgtgcgaagagaaaccgaccgcagacggcagaacgagactgaacccggacacgtagctgtgatgaccagacgtcaaacgagagcaaaggagaaacacgtccagtttgcagatgaagtctcggtcaccgatcagggagatgtatctcaccgagtagaagccaatggtgtgccgaacgagtctcagaatgaagcagaagcttcaccactgcgtgccgagacgtcaccaggcccaccgaacgcagaagacattgacccgctggtagtacaggaagaacgccgaaggagaatcgcctccgctcaagatgaagagttacggtggtcgaatctgaaggtagtgctccggggagatgatgcgaagattggatacagagcagcacgagatgcatggaaaatggcggaccaatttgtgttgagcgaggacgatgtacaatattacacaagaacgagcagtcgttcaagtgacggcgagcaggccgagttgaagatgagactcgtggtgcccacaacgatgatccaagaggtcctgcaaagctgtcatgactcacttgaaggcggtcatcaaggtattacccgtacgctacatcgagcggcgagagactattactgggtcggccagtatgccgatgtggagaaacacgttaagtcgtgccctgactgcagttcaagtaagagccgacctcagttccgcgggtactcgccagggaacatcctagccgagagacccttccaactagtctctatggacttcgtgataccgctatcgaagaatcgccgtggcaactaggctctcctgctattccaatgctcgttcacgggattcgtgatgggcaaagccatgtctggcactaccgccttactcgttgcgcaagctttcgaggagtgtgtctaccgacgttttggagcaccgtccttgatccgtcatgaccgagatcctcgatttatgagcgagatcttccaagccttcgcggaaatgatgcagtctcggtcgagagcgaccctgagctaccacccgcaggccaacggccagcaggagagatcggtgaagacgatcatgcagtcagtccgcgtatacgctgaagacccactacggtaggattgggacgagatcgccgaaagactgatcttcgccatcaatagctcccgtgatacgacgaggaaggaaactccgttttacctcgttcatgggtgggatgcacagtcgacgctcaaggcaatgtctcgtcactcaaacgaggcttcggtagccaaactaacgcgctagcatggcgctgagaggtcaaccgacagcaggaaatcgagctaaggagtaccaagccgcggaaaaggctcggagagtcgcttggcaggaaggagaaggaagccatggcaggcgtcaacgagaatagaacctcggtcgaccgggcaccgagttcccctgaccatagtatagctgcagtgacgagaacgaggttttctttgcagcccgggagcagagtgtggctgtacatggagcaggttcgaccaggactgaccaagaaactagcccatcggtggcacggaccgttccgcgtgaagaagaaggtcgacgaatttgcgtatgagttggaattacccgaccgaagtggataccggttctacccggtggtgcatgttttacgactcaagtcagtggacgagttcgaaggccgaccgagggttcgtttggcccgtgaggtcaccgaagacactcctcttgacttcgacgaggaattactgcctgaagacagttttgagccggaccgcctgggcggcgagtatgaagtcgaggctatcctcgatgaccggtcaccgttgtcaacgatcactcaccgggccgtccgagagttcaaggtgaagtgggtcggctatgacaagccgacatgggaaccagcgtccaatctctcgtgcggtggcctcctgtacgattacctacgccggaagcgaagcgaccgacgtttgcaaatggtccatgtggccgacgaggagtaattctgcgccccaacgaggattgaactgctcgcgggggcgatccagcccgcgatgtcagacgaacgaggctactggcgatgatgattgaactgcctgcgagggctatccagctcgcagtgacagacgaagaaagttactggaatctgcatgttacgtgttaagtgaacgagtcatgatggaatggagatatcggaatggagcctgggacaacggaagacgcaagcaagcctcggtcaaaccctcaacagacgaaacaagtgatgatgaagcaaatgggagggcgaccgaggcttcggacgcattgattgccatggaagtagcacgaacaagtgcactcgacttcgtgcttgagtatggagttgatgatgaaatgggtatgcaagctgtcgacaacggatacccgcagcagaccgggtgtacagttgtcaatattgggctgtcatgcgaaaacatacccgcaacggagctagcgtaagtacgcccggtctcccgcgaatcaagtccggtcttcaacgagcataagcccgatcttcttgcagggagacaagacgaagcccggctgccgcagctacgaacaaagcctcgtttgaggcagccacagcggtcgagggcagagaagaagctctgggaaccgcgaccgagtattgaatgcgatgtgcgttgacgcgagaaaagattatgaaatggaacgaacaacatgacgttattttggattgggatagcacatgcagcatcgcctaaagcgccacggacctcagtcgacattggaaaagaacgtgaacgaaacggtgaagctggagcggggccaaacgaggctaaatctctatcacagcctgagccaacacgcccaaacttgacccggcggcggaagaagcttcacccgactccttcgtctcctcatcggggcttggagagcgagaacgacgagcgtttgcgaactcggccacccatggagcgaccaccatcgaagtccgcagagaagattcgaccacgaccgacgacgccacggtttcccgagtcgatccgttggggaccaacaacgggacgttgttacaaggggcgaaagccgttttgtaggggtggtctgccggcgcttggaaccaaccgttacgccacggctcgcgggcatccacgtccgccacctcggaggcccagtcgtcggtagtgggggcccactccatctcctcgaacgagtattgcaggtacgacggctccagcaaaacctcggtgcggtgctgtggaggttgtccgtcgtacgtaatggccccattccacaccttgtggagcatctggtctcgcaagcgatctgcacgataactgcgctctcggtggtacttggaccacgcttgtcgaagcgctagggcttgcacgttgcgctgaccgagggtgctggagaggttgtcgatatacgccttgacagcattacccctaatccagtggcgacactcccacaaggcgaaaccaaggtcgcccctctcggtggagtggtaggagtacccctggaactgccaccataggcgaacgagaagagcccgaccagttgcacgacgggatatagccaccgaggatggaaaacccgtcgtatcgatcaaacaaggctcgtctgagaaaagctggcgcaacacttggaaggggtgagcaggatccgtccacaagccaaaccccacgattctatccactgaactgggggcgaccaagtcgtcctcgaagacgagggggatactggcgttttggatgagatgccagcattccgactctccgggtgccgtgaaacccggctccaagaacagggtagcaagaccactgagcttacgcgatccaggagctacgtcggaagcgtcaaccactgctggggcaatcgacgcaggtccagtcctcggtgaagctgtcaccgttgctgttaccatcgcccgagcgtgaacagaggccgaccgagtgtggagtcgactcgggagtggcacggtggccgcttgtgaagctagaggaacccggttcgcggcagccagaggagaaggaggctccgaaggagtgacaggttgcgccaccgagatttcctctctttcgtcggggccgaacatctccaggaacaacgctgcgcggtcctcggaagtctcagactcatgaggcgactcaccgctaggtgaacggtctggcgggccgccagagccctcggtgaccccagcagccgattctcgaggggcacggccaacgacggctgtaccagacgagactggtgaaggaatggaagtcgccgccggaggcgaaacctcggaaggaacctcgatgacagtaccggaaggctcggtagcagaaccttgaacaccctgagcgctggccgacacccccggaacctcgccgggctcaaggttatcttgtgaagtgtcgctaggactcataccccctccaaactccacgtcagacgattcctgctgctgggctggggctggcgagggaggcgaggcacgactggccagccaaagatacaaggggacgtctgagtgttcgtacgggagaggctgagactccaaccagcttgagcgagccgtcgttggaggacgcaccatcgaccgaggaggcgggtaaatctctcctgatgccgaacgaggactagatggcgcggcggccgctgcaaccctggccctcaggtcgactgacggtctgccgaagcgtttgtgaggaggaggctgggatgccgtattcccgacggaagcagactcggtttgccggccccgcttgcgcgatgacgactcagtggagaccggggagccagccgaagcgcccaccgaagcagcgggagcggacgtagcctcggtggactcagttatcggcacgtcggtcgtcttggactcctctccctcctctgacgaggattcgtcatggcgtggactctcgacagtgaccgtcggtggggacagcccgagtagattccaatcaatctctgcggcggagatgccggctgaggccaggacgtcgagtccgtgtgttgccgagtgccgacgaaggatagaattcgctcgccgcaagctgttgttctcgtccgtcaacgcttgaatgcgtgcggggatgacgtttgctcggtcgcggtcggccaactgcttgcgaagcctctccaactgagtgttgtaggtaacgaagcttcgtggagctgggtgttccgacgtacagcagcggccgaatcggcctcagcaacgagcgtccgcttctccaacgactgagtgatgtcagcgtggtgagtgatggccgcgttcgcttgcatcaactgagcgctggcgttgctgagctggacgcgtatgtcctggacgaggtccagagcttggtcgcactcggagttggccgagacgaggaagtagtccgacttggtccgcaggttcatctcttcagcgagtttatctttggcgtcggagagctctgactgcagccggtcgttctcgcggcggagggccaccagttcatcagccagcacctcaccgacgctagtagcagcttgcaggctgtggtcgagagcagcgttgactcgagctggaggtaaacgggcaacacccacgacgagacgagcgagttccagcatctgctgctcgcccaagacgaccgctgtcggaggaacctcggccgggccagcaccagctccggcgcgaccccctacagctgcctcgcccccccccccccccccaccgacgccccgcgagttgccaacgtgaccaaaggcgcgggagttggcgacggtggagcgctggcgcttggcggcggtgtcggcggcgagtcgggagcctcttcactgggatctgtcggcgagggagtctcggtcgccccagcaccagactcaggactacttggaggagccggtggggggtcgaccgaggtcccagaggcggcaggaatgagcgtagggtcacctgtaggcgcggccgaggctggggcacagcaccagcggcgataggggcgggggcacccggcgaacgagcctggcgcgccggacgacgacccgaagtgtcggtggcgacatcaatagctccctgagatggtcaagaaagagatggagtcaacaacgaggatccaaatgacagtgaggagcagcgggagcgacgaacgtaccggtccggagcactggagaccccgaagagcagcggcagccgcgtcggcgaatgcacgcgacggaggagccatggagccgaagaacggaggacgcctagacgctcaccagcgtgggaggctcgcgtcgaggcgggggcagttgtggtattggaaagtggcagtttccaacgctgttgacccgccagcccgacaatcaggttcaatccaggggcgatcaaggcgaggtcaagcgagagacggaggtggctgcttctgattggatgatgacattatcctcggtagagtgacaggcagtggccgaagcctcgtcgggtcctaatagaaccccgaacgaggcttcatggtaccaacttttaggtacagatgcatttagttacgtacttcggccccacttattagtgtagccgcggtcgtcatttgatgtgtccggaatcgccttaatgcgatcgttcacactagatatttgtatagggacataggacgcatcataggatgaccagaacgaggcccccagggcctcagaaaactcagtaataaaaagacagtcttccccaaaagccaacaagggtcaagtccgacttcggtaagtgtagctagcttattgtagtgcctggacacgctcggctgcgtgtggatgcatgtccgggagcttatcgtgcattgaccgagagtttccttggtagcgaaaagagttggcgtggccggagaggcaggaacggtattagagtatcgttcggtatatatttgtgggattagagtatccctgagtgtattagtctacctaccgaggttttaccttggtccccctgtataaggcctaacacgccggtacccttcttttctgagggactgcagtggggttgcgcgaaagcgctacatagtatcctagccttagctcgtggctagtggtacaggtttttgggttgaccgaagacaacctaaggtgcacagaggcgcttgcaaccgacccggtgtaagggatcgttcctggtcttcaggttttgatccaataagcgcttacctttgcgggttagcgtgttgttggtgtctctaatatcttttggtagaggaggattttagtggaattaccacaccacacgagcagactcgccacgcattagcgcatagtgatacaacaggaacgccagcaaattcctcatgctagttccagggtcgtgcgacgaggtccaaaagtagcgagcaatctgttgtagctgatccgttgttgtgtagccatccagtaaagtatcagctcctcgatcggcaaagttcttacgccgcagctgttcctcctcggacgtcgtaattttgagaagtgctgtaacagcgctatctcgaggagatgggttgctgttgatattcagtcgtttctgttgcccccacaagtcaaccatggcagccacatagctgttgacagtcggtttaccatttttttcgcttctccccccgtgaccctttctgtaacggggtacaatcaagtgtacccattacatgaagagtgatgggtgtcactctcccgagtacatggtacatggtaccagtagttccgcaagccaaccatttgagtttgtgtgggcttttgtatagttaacttgtagtttgtattacgaccaagttaacctctaccaaatacacaaaatacagtaagtcttataacctactcctttgttacaaaccgttccctttgaggccgggaactggtgaactgctgttcaccgggatagtaatatccgcacgcacttcctctgtgcattgtgctgtgtgaccccgtctcacttggtagcactagtagccaatcctacgcctacgcaggtagattggtctacctgaatcctcggtggctcaggtctgtgagccacgatggaccgaagtgagtttcctcacttgactgactcgcagttcgagtcggtgcggaagatggcgggcatcttcggaagagatgccctccggagcttggcggcggcgacgccagccgagcaggtagcgcgtttgacgagtacgaacgcgggctcatcgctcatgtgcagggaaacctgctggctcagatgagtgagcccaaacgggtgcagcctaagcctctgcggctagctgtgcctctgttcgaaggcgaggaaggtgagaaccttcacttctggatccgggagaccgagatcgcaatgagcgcaggtctcatctcggccgagaaccttcgagtcgccttcgcgctctccaatcttggcggacgtgccaggacttgggcgtatacgcgcgaagcgatgtcgcctggatgtttcacatcctgggctcagctgtgtgagcagcttcgagccgcttttctcccggcgaacaacgagttccgctagcgctcgcgcttccttgcctgcaatcaaggggagcgcgagctgtacgcgtacgtacaggagatgcgcacgttggcatcctcgctggtggggaacccacagtcggaagacgtcaagatgacagtcttcgtggacggcctgaaggtcggtcctgcgcgcacgcagttgttccgcgtgcgcaccgccactatggaggaggcgatccaagtcgccctccaggaagagtacagccacaagcaggctggtgctctggctgttgtacagcctgtggtcgctgacagcgaaccagaacccatggatgtgagttcggctgagcagtactcagtccactgctacggctgcggcggactaggacactatcaacgtgtctgcccatcgcctgggtctgggaagaagacctacccgaagaccagagggtcaagggggcgccgacgccatgcaccgtcaggtgctcaagggggacacaaccaccagtaaggacgagggccttgctggggttggcccgagtctttgtgatgggtgtacggaaggcgtacacgacagagacccggggtcccttgtgaacactgacgctcgcattggtgaaggacaacggtgggttgtcggtagtacacgtgagtgtgcgggggtaatggtatccctagacatgattgagtctgggacgtcgcgtggatgttcgcacgtcgccagatgtgtcggttggaataacgacacaagtgccgagactctgcgagagagtctaagcgcaaggtcaggtctcattgactgaggctggaccgaagaagaaccttggggtccgcggtgaccctggctgccgcgctcgagggcgctgacagcaatggaaccggacatggaaccggacatcgtgccgaagccggccctgggcatggaaccgtatatgccctcggcttgagcaagtatggcttggccctgagtgcgccgtgcaagctgcacaggctctcggtcgagtagcgcgacaacgccttgaggctaagtcggccctctgtgtctgacagagcattgatgagtcatgttcccacctctggacagacacaagggcgtccgatgggaccgccagggcgctggatgcgtccgacaagacgaagaagaagaagggaggcatcattgacatgctgatctccatgaagaaggtgcagtgtatctgcaaccgagggctgttatgcctggcatgtggagctgcctcaacaagcaattccagtgctgagagtcattgctcggcatgagcattgacaagggtggtgttcgatgacaccaccaggtgggtaaccaaggaccactgactagcgggtaacttagttccgcacagagcatgtaatgctgaggaggccgctcaaggcacctcaggcgtggttaaccaagtaccgcggacggtcgcccagaccttaactggagaagaacgcgctgcacgcgcttcctgtgtgggtaaccaagtaccacaccaggtcaatcagacctaaactgatgaggaaggtgcacgatacacttcttgtgtgggtaacgtagttccacacgatgccgtaaggctctgcatgagccggaaggagtcgcccgaagcgacttcagcgtgggtaacttagttccacgcacggtcagtatgaccaagactagtgatcaggtcacttgggtctcctcgtgtgtggtggataaccacacggagtttaaggggctcgtgacaccgtcacgatgtcatcgccgcacggcctcttgaaggcgccgcgcggctttgattttaagcagaagaggagtgcgcggaagcacatccttcctccaagggcttggcacccggtcatcatggatgacgttcgactgggtgtcgaccagcgcagctgtggccatgcgcacagaagacgtggcttgggtacacgacgtacctgcggtgatgcatgttgcgtcgccgccgactcggcgagcatggtcgatcacgactggaacgtgtctgccggagggcgacacctcaatgaccatatgcaggagcatgctcggtctaaaggcaaaggccgctgcgcggcagggatcgttggtacggtctgtcgcgcctagcactgtgcggcgttgggacaacaagtgtccatgactcggtgccgagatggctgagtctgagtatgcgtgcatgccatgcagctactctgaatgcaggacaagccgtacgctgtcatgggtgtcattgcccgaagacgtgggtaacagagtaacacgtcaagtcacgcagactcaaactgcatccaggctggtagatgccaagccctggtcgacgatgttgacccagagccaaagaagggtagctgcccgtgccaccggagtctgctgtcacggtgactcggtgctgcagggcggcgcgaggttaggcggccggctggcgcctgacccgccggggctcaaatcgtaagtgggggaggggatcggaagtgcccttcctcccgaggtctctgacatgagacttgcttcgtcgtagaagccagtgtagtggctgcatggtgtagccactcacgaagtattgcatgaaggtgctggacctgatgcatcgctgctcaggtcccatggtcatggtgaccgatggccagcaaccttggcagcggctactgtcgctgctgggccgaagatggcgcgcgcattcgctgctggaaggctgcctctgtcaggcaaagacatggcagccagtctgcggcttggtccgcggacgatggcatgtgtacatacgcaacaccatgccgcagcgtggtgctgttgcaacactggacgcggtacgtctgccggccaggtagctatcagtcccgagcatgggtgttgcccacgaggggagaacccgaacgtgttgcctttgcagacattcacagttggcgcggcacatgccgcacctgtaaggcgcgaagccatacacgtgcacgtggcacatactacctgtgagatagtcgcggtgcgtgacgctcactgtgcgcgtggcacttggtgtacgcgaggtacccctagtgcacgcgacacgtggcacttgaggtgcacgaggcacttatggcagtcgtggtacgtgccatacacgacgtgcctttggtgtatgaggtggtgccctcgtacaccttgaggtcctgtatgaactgtgtgccatgcggtcttgcacgcacacctacctggtgttggtcaccgcgacgcaggatgcgatcgccggtgacggagggcaatacacctcacaccacgatgaagtaccgttgcggtaccctggtgtcgaaggaagacaccttagcgtcggcgacgtcatggccgtgacgcactgcagggctttagacaagtccgccgcgttgctctgtatgatgagcgggttgctggaagcagccatggtcgctcaagcaaacacgacgttgaagcatgacgcttcatggctgtggtcagcgcttgaccataggccatgggtcgagccgacgtattcggccgaccggcacaccgtgctgtgacaaacggggccctgtcgggccgctgtcatggccggagatgagcagcacagctctctccatggttacgctacgcgctgaccggaaaggtgctgtccctcgcgggaggcactgcagcacgaacgtgccagcggggcccgagggccatgcgacgccaactgctggttgtctacgagggacaccgcaagtttggaggcacatgcatcccgtgccgaggctctctgtgcctgttagcgctgtgaatacggccactaaacgcgtcggcttcgcggccaacatcgtcgagggcaggggggttccgcgcggggtgcccgctgcgggcacaagtcactgtgggcgtgacgatgaggcgcgccagccttgcggcgcccgagaatccgacctttgggtgttcggattctctcgaagctaattggagaatcagatgtgattctcagataagtgggggaggatgtaacggggtacaatcaagtgtacccattacatgaagagtgacgggtgtcactctcccgagtacatggtacatggtaccagtagttccgcaagccaaccatttgagtttgtgtgggcttttgtatagttaacttgtagtttgtattacgaccaagttaacctctaccaaatacacataatacagtaagtcttataacctactcctttgttacaaaccgttccctttgaggccgggaactggtgaactgctgttcaccgggatagtaatatccgcacgcacttcctctgtgcattgtgctgtgtgaccccgtctcactttcgtcgcttttccctcccaatcacgcactccacaagaaaaaggtgaagttttggccgttactgtgtgccgagtgagatcactgaaagccgcgcccttgccgtcacatcaccgcttgaattcgtcctgcttgcttttatatgctctcgaagtgttctgtgggcgaatgttagaagctttttcgtaggtgcggcgcacagactcatctaacgctacacgcatgagagattcctcggccatgctgctcctgttttcagtgctgctgcttcttgttcttcagtgctggaagttcgccccctcccctccatttcagccaatgggtgtgcgaggacacggggcagataactggcttatttgtaccggtggctagggcaataacaacggttataggtgcgcatgacggagaccgcgttcaactttaagatcggttttggacagaaaagtttgcttcgaagactttgtgaatagtcagtttgccatctcgtcgaccatctgtgagaccaaattcgtcatctgagcttgcgatacagctacagtggagtgtacagtattggataggttcgcaatcccgcaatctgagcttacatacgtcagagattccgtctgggattgactacatttccactttaacacctcaggactctttcggcttggagcctccagctttgtgacgatgcgtctctttctactgactgctatcgtacgtctctggaatacttggcgaccgcggatacgcaggtgactgcactaaatccctcgtcaaatgcccgagagcctcctgcgcagcagaaccgatacttgagggctctcaatccagtggatgcagtcgacgacgaggagaggatgattaatgtgaagaacattctaagcagcgacaagctcgacaaactggaaaatttggccaaggctggagtgtcgaaggtcaccaacagagcacaagctgggatgttgaagctgaagggaaaaactgccgatgaagcgttcctacagctcaagctggacacaaggccggagacgacttgctcagcagcccccaatttccagtgtggttctacttcatgacgaagaccaacaaaaaacaccccaagacagcgattgtcacgaacttggcctcacgctactctggcgaggatgcttgaggcggcaaagaaggccccggggacgacggagatcgccacgaagctgcaagttgcgcagatgcgggactggctacgcaggcagaagtcgatggacgacgtcctagcgctgctgaagctagacgacggagttgataaggttctcacgaacccggcatttgacacgctggaggtctacatcaaccagttcaacaagttgaataagctcaaccctgacaagcagacaaccacgatcaatacgctcatggtgcaacacggagacgaagcggtggcaaagatgctcgaggcggccaaaaaggtgccgagcacggagacgctggcaaaggagctccaggttgcgcagttctcccagtggctgaaggagggggcaaagcctgccaacatttggaaaatgctcaagatggagaaggccacttggatgacgaacccggatgcggatgtatggcgcggataccttgccttttacaaggcgcacaagttgacggcgaaactaccaacgccgtagttcgccttggtgctatttcaaatccggcggatcaactagaacgcgttgttttctctatttgaacttgaagaattaacgagaatatctagcgtataacatcagcagtgtttcattataattttacccaaactattgttgcaagtgtcgagtacggtctatatagaaagcgtgtgatgcctgccactacgcgctcagatattcaaaatccttgatattaacaaaaaaaactcacttgatgcgcactagaatctatgtcttcgagatagtgtagtccgtaagcatgttggataaatagagaagaagaacatatcgtatcagtcagctttcggtgtctaaaaagagttccaagatgtattaatacgattaaataccataacatgactgccagattcgctacactgtattcaatgtcgtcacctttgaatccgcgaccgccaaagtatctcagtgtagtcgaacagacgatagcacccagtaggacgtctgaaatgaaacgcatcgtcagtaagctggagctgaatagtatttgcagtaacactaatgtaagtgtatacttcgaagtagctagttctcccctcaaagactcccgaaaattaaactcccaccacggtagtactgatacgtgggggctattaaactagtcggtgacaatgaagagagtggagactattcttgtgtgttcagaggtcctctatttacgtttgtttgaactatagagtcctgatatcgctgtagactgagcctaatggataaacggtgttgggatggttcctcctccggcgaaaattgttcttgcaagtagtcacatagcttgacaggcaggtgctctcgaaagtagtacagcattggtaaactaagatagttgtcgcaatttgagaaatcccccgatcgctttgtagatgcgtttggaagctggtttccatgctatcgagacaacgtctttgagcgcttggtgcgtggcattctgggctcgagccgacttgatcattggttggatgccttggacacagagagagactgtagaaagttgagctcgctcctttagctgatgcatggctcggacgatgagctgaacagccatactagtttccttgactggctcgttcacttgggcgaaaccaatggcaattatttcttgtgggccgttccccaacaccacccaaatacctcttcgccctggcaatctgtccaatttcacagagtgaaaagttagagtccagcgctgaattgcgatcggcctgtctgaaggttgaattgcaaagaaaaccgcgtagcactggtccaaccgaaaactcgcttctttggttgctgggcgcgaagccattccccggatgactgcatgcgtctggaaatcagctgcctcccacaagtttcgcttagcttcttgtgggggagtggagactattctatgggggcgactttgttcaatagccccctgggtatccttcatgaccaagaccaacagaaaacacctgaaaccgacggctattgtcacgaatttgtggtcacaccctacagaaacgacactttgtcgaggctgcgaagaaggccccgggtacgaaagagatcgcctcgaaactccaagttgcacagattcggcattgcgcgcaggaagaagttgacggacgaaatcataacgctggggctgttgtagcttgacaaagccctcaccaagcccgtgctggacatcttaggcgtggattcatctttcgcttttaggcgctgtaaaacaaggagatggtatggctctgtaaatgtacactcgttgttagtgtcaccacggcagatttgaaaactaagcttagctcgataatctcttcgtgtacatgtacttgaatcttgatgccggggattttcactaccaggcgtgaaatatttggtgctacatcgaaacactacgaagtacttcattaaatgtgagaatcccagagtttgagcgagactaagctaggctccagtagtctactagcatgatgttgtctcttgtttttccacctttcttgggcttagtgcatgtacaactctggtttttaattcgcatgtagccgaaactgatagccttctaaccatcaatgcgcataggtgtactgcctaagtcttttggtggtatatcgacccgggatcgttgctggactaggtctctgctagctacaaaatatctaaagcctaaactttaaggcaggaggaggttagtaagtgtgtccgtgagcttcgatgtcctggaaaaggtgtctactggtagactgaagactacttctgctcctctgtcgtatcctgcgacgcacactacgtcttcggcgggcgtgggccccacactgtggggcagaatatactggcgccatcaagcaaagacgagtggcgtggtgattgcagccggtgagtggattcatgccgttccttttgatttcatcttttggatactcaacaaaatcgtacgtggactgcaccacagtgcccaaattgccaagtctggtctaacttattataggagcgatatggtaacttatggaaaccaataactaatatagatgtgtggttttgtgtgaaaaataactaatatggttgtgtggttttgttcgaaaatgtacattgttgccccttaacctagtattcactaacgatagatcatgacctagttggcggtcgggctctatcctacgtgccctcttataaaaacttgaggctagagtattcgtagatcttaaagcgcggaggtgggagtaccgaagaactcccatcagtgtttcgactgatgtcactgtacactagtcggaatatttgatcccattgggaacctggcaccctatcgggcttctgctggacattccgacgcgagtccacagctatgttggccagagcccgaccaatgtcctttcctccatcggtcgtcgtcgtttagcgtccgcaactcaagttgacgcttctgggctagccacgagagtcgtagttgctagtcttgtttcttccgatgactggcggcaccgctattgatatcttttactgggataggaagcgacgaagtgctgatagcccagcccaaacaggattaattcgggcgatgtccccccgtccaatcgacaccggtgatgaaccggtaacgtctttaggtcaatttacagtaagtgatgtctattgaccgagtgttttagacttctcaagaatgatggaggctgctccagttcatttgcaaattcgtcgagttagattcgtcattgattttgctctgaaatcggttgtacgtcgtgacaatagcggcgatacattgtcgggcagattctgcggctgcgaagcaggcgcaggagatgcccgtggagcgtgcggattgagtttatcaatggcgatcaaaggtgggttaaccaatcctatcccagccttcgcgaagcccgagtttttttgcttacttagtgcgccaggaacctggaaaacgtccaccaaaaatcttcccgtgactgcgtatattgcaactttcattgtcaaatatcaatttaaagcattcaaaatttaaatactataaattatttaatatgacatttgactcaacgctattagaagaactgtacaactaacaccagcgttcgcaagctgtttgctagtctattgcgaatctggtttaaaaaacacgtctgtggagctagatggctttcaaattgttcgtcttgaagcctcttttaagagctgacctgtacgaaaagttcttcttccctccgccaatagtgatattgtatccttatgccagaatacgctggctacgcagtggtgcgtacctggaatatgaagttcacaagcggtaacagttcacatgggtaaccactaattcgaacgctaatgatagggcagaagactacgaacgcgtttgcgagcagcacaatcaaagagttagtgtattgtgaaaattgtgaacatgtttgtggagtacactagatggttccaggactctatagtttctagataaacgtagattgagggcctcttaacccaggggtacactagatggagcatatcagtacagcacagcgcgagataattgagttgcagaaagagaaacaagcttgtcgtaaactgaaatgtcttgatatacaggcggggagtgttctgtatccacgaaacgcgagtctgatttatttgacaaccatcttccgccacgtgagtgctgaattctttacgttttaaagttttttcataaaaaaggattggacaaggattgaagtgtattcatcttcttgtagtttaaagtgcgtatgtactgcggagtagtaccactactagtcctagtttttggttgtgcgaacgggtgcctctatatcttttacgagagatagtaggcctttttgtcgggttttatagtagttctcttcccttgaactcttttcgttcaatggttgagacctggccagtcagctcgaagattttgacccagccaagacttacacccccgaccatcaagacctcatccatttagacagctctgggcagggattgatcatctccagcgactcgctggagatgttcgtcttactgtatgagtcttctgcagcgaggattactgccatttctgttataccgtaacgatggaaagtattcttatcgtatcctctgttcgtgcgatgacagttgctgctagacccatgagtgcagcgacatcctcacagtatctgtcttgttacatgtagttgaagcggatacttcctgccagtcgcagtacccagtcgttttcttcagtcaatctgtttacgagccaccctctttctttctgggtgggtctgtgagatgcctctacttgaaaatctgttggatgacctacaccttggatacacgtacaaaagcatgcaggcaccaaaaccgaccaggcttctctattgtgtaatcttgatgttcccagctctcaaccttacactcctcagctctttgatccatgcattcgctatgtcatccgtgcttgacaccttcttagccgcctccagcatgtccgaaacagctttgactccatagaacttcgtgaatacccccatcacagtcgtcttctgttcaggattcttgaggttgaacagatccacgtagtcacgcagcgactggacgttcgggctggtcagaagcttctccactcctccatcaaggtccatacgcttgaagaagtccgcgggtgtcatgcccttctccagcaggatctgcctactcaactgaggctgccatttcgccgcaatggctttcgtctgctgcacatttttcgccttttctatcatgttccacatagccttggtaccatagaatttcgtgaatagctccatccaggtcgtgtgttggtcaggattcttcaagttgtatcgctcaatgtagccgctcagcgtcttcacgttcgggttggtcagcagtgtgtccactccggcgtccagtttcaacagcttgaaaatgtgctcaggggttttcccccacattttgcccattgcggtctccagctccagagcaatgtccctcattcgtgaaactcggggcgtcgaagcaaggaagatctttgatagcccatcgtagccgtatttatctgtcaacaccctgatcatttcctctttcggtttgatcgtataggtcattctcacataggaataccatgtgttcaactgcggcgacacaaagagcttgatcccggcctcgtcgagcttgagcatcttgaaaacgtcatctgaggattctgccgcggactcccaagagtcgattagttccctccgcaatcggtacgatattttgctcgtgcttgggacgtttcctgccctctcgagtgccgcggccagtttgtccacttggtaggtcttggtgaacatgtcgatcatcttcaccttgttggacgggttctgcttgttgaagcggtcgatgtaggcggcgtaggtgttgagcttggggttggacagcaccttttccactccagcattgagctccagtcgcgcgaagacgtcgtccatctcgtcgtggttcttaacccactttttcacgttcagtttgtcagcgcgggggagtttggcctctgtcgacggactcagccacttgacaagcctcgagttgccgggaaaagtaatggctctctcctcgtcatcgacagccctcagcagtctcgcgtgaggatcatcgcggcctaggctggtaacggagaggggtgacttgggagagcttatttcaataggagtagattccggtacagcactgacagttgaaagaagagcgagcagcactgcaatgcagtagcaccacaaacacatagttgctatttagcaggaagaagtgctgtcttgggggagggcgtgcggaactaagagtgccgcccgcagttcaagcggatggaagcttcgcgaagcctccacagccgccctacatctgcatatctattttaacttggtttcactatacctacggtgagtcgtacctacactgacctcctattggcttacctttctaccaatcatatacactcaccccttctctggctgcgcgcccatccgacttgtcattcccgaaagagacagagaaccgcgacacttccggctgtcgcctgaggaattagtccgacctcgcctggttgttggaggcttggattggttccttgggctgatggctgtgtcgctagcggtttctactgctgccggaatgcagtctcctgcttccgcgcgttctgcctcgcctccagcgatggctgatcatgatgttgaggctccgctgtctgcgtcgtctctggcgaccgcaaatctcgatggtccgtacatgcttccgcctggcgccgccacgccggccgcgccggcagactctgaatgcgccgccgcgctcgcgcagattgtcgatgttgtggccgctgctggtgaagacagcgatgctgactccggtcttgacgaagagatggtacgtgtgtgggaagaattagagctcaccagtcgctctcccggtcttggctctccagattcgggctcggcgaccccggcgccgccgcctgcgtcgccagcgccgcgtgatgttgttgcttcggctggtgggttttctccacctacgcggctccaggagttgatcttcatgctcgatgtggaagggttgtctgtcgaggaggcgatagctgctgagcctgcgcttggggcgacctttgaggcctcgcctgaagatgaatccgggcttttcgatgatagtgacgatgatgaaggcctgcctcaggttgaccgctcgcgcttgcgtcgcggtgacgagacatcgacgtggcatccgatgccgcttcctccggcgcccaaaaagcacccgtcgaacaaccgcaacaaccactacgacccgaagaagccttgggattacaacactgaggttgacatcgtccgtgccttggatgtctagggcaaggctccgcgccgttgctacttggtggaatgggaaggcaatccgctacagctaagctgggtctggatggagcagctcgacaaaccgtcgacgcgctacatgatgaggatggtggacgcttggaaggaatcgggagacaagcgcaccttctgttattggtactcggagggtgattccgcgtcggaggctggtacttgtttcatggatgctttccgctcggccttgtactatctcggacagccggatctagtcacaatggagatgtgggatgtgtatgaagacacgcgacctgaagccatccagtacggagtgtctcgcgacgacgtgacggagttcttcaaagttctgcagtgcaagagtgtgtcactgaactacgacgtccttctccgaaacgctcttccagagtcaagtgccaacatcacgacgctccaaggtgtttgccgcaaacaagcacccggtgtttacgtcgtcagcgctggccgcaatgatgtcgggcactgctttgtcgtggttaaccgtcgtccggagaagcaacttctggctcttgacaatttcaatgcccgcaagaacccgccggtggacgttcttcctctgagttaccagtagtggattcagcacgtgaaatggatggcgcaagtggagctgcaaccaggatacaagtgtcgccacggcaagcgcaagtcgaagacgcagaaaaagcgggagaagcgcatgaagcagcaggttctgcaacaagaggggatgtaatacgggaatacatgtaggcctttgagcgccccttcagctgatcctgcttcaccgttttcgacgcttctttcgccttgcagattcaaattccgcgatgagatctgggacttgcgacaagttctccactggttcccaggtttgtttctcctcgcccacccactccacaagatattggatccgccgttttcgcgttcgctttccacgtaatgccttgacgatctggccaatgctgccgtccgctaagattacgtcgcttggcctcgacaagcgagtgagctccttgtacggcttcaatgacgcagtgttgaagacgggatgcagtttgttgctagcctggatgttgagctcgtacgcgtggttatgaatcttccgcaccacggtgtacggtccaatccacttgggtccgaacttggtggagttgggcaagccggagtgcttcgggttcagattctgcgtgctcaagtataccctgtcaccaacttcgaagatctgttcaacacggtttcggtcgtagacgtcgcgcatccgttcttgggcctgagctaacgcttcgcgacagcgtaagagaatcgccgcctgtcgctcgtgaaactctgctccgcggcgactcttggggacactctcaagttgctcggatgcaagttgaagtggattcagcggaatgtagcccagatcggcttcgaacggcgcaagcttcgtgctggagttgacagttgagttgacagcgaactcagcgttggcgagatggacgtcccaatcatcttgcagtggaccgacgaagcaccgaagatactcttccaaggttcggttcatgcgctccgtttgtccgtcaccttgagcgcgatgtgcaacggttatgcttagcttcgtcccgatggacttaaagacatgctgccagaaggcggacacgaacttcctgtcgcggtcggagacgatattcgtcggcatgccgtgtaacttccagatgttgtcgatgaagagtcgagcaacaccttcggcgttcaccttcttggtggttggcacgaaatcacaccgcttggtcaaccgatcgacgacgacccagatagagtcgacgccccgctccgttcgcggcagatcagtgatgaagtccatggagatggatctccaacgctcgtctggaatactgagtggctcgagcaacccaggaggtttcgtcaatcgcggcttgttcctccgacaaggctcgcagtcggcgacaaacttctggatggacttcaacatctttgaccagtaccaatggcgcgccagtgtcaagtacgtacgtcccgcaccgggatgacctccgtagttggtgtcgtgacactcgctgataattgtctgtcgcaacttcacatcgttgggtacgacaacccgtggagcgtcatctgcaggcgtttgataccacagtaccccgttcgcttcggagtagcagcagtatttcttgtgctgccggtgttcgcgctttggttttgagtcggatttgcgtcgcttgattgctgtcaagattgcttggacatcacgatctttcttgtacgctttcttgatgcgcgtaatcagctccgagtcacccgatacttcgctgatcgcgaggctgaaggatgtgtcgtcgaaactggtcacccgtaagtcgtggcgtgtacccgtttaggtcgcggtcgctcaagcgcgccgcacccggaagacacaacgtgcactgttggccttcgggcacatcgcatggaataccagcgtccacagaagatctgtggagctgctccaacctcccgcgcgtcgagaatgtctcaagcgttcacgggcgtgcttaacccgctcacggtaagcagccggcttcttgttgaagttctcaacaaaagcattccaactttgacaaagtgcctgccactcaggcactttgctgcgagaagaggtcttcttgctggagaagtatcggagctcgtgaaagagcccgatatagtaatcgcgcctttgatttgttaacggatcaaagtgctgctcctccgccacagcatcatcgtggatcccgctgcatacgtacagcggaatttcatttggaggcacggtgttgcccacacggtctgcgatctctgacgcagacggcatccacggatcgcgcgctgcctgagcagcgcgcggagagcttgaaggcgccacctcacgcggggagcttaaagccccagcagcagagagcggggtgtcgctctcgccgcgcgaacgcttcgagctcgaagcgtccgagtcgtctccttcacgagggcgtctcgacccggcatgcgggtcgagactatcactgtcgatagactccttgcgcttgttggaagaggcctcgccctcttccatctctacgtcgtcactcccatagtcaacggcgtcgttgactacagaggaaccttcgaggacaatctccgactgagttgtcctcgacgggttttcaacgtgctaatggtaaaaataatcaaggtaattgagttgtcctcgacgcggcctttgcagcgagcgcgtcgcgctttgcctgctggcgctcatggtactgagcaacagagaggttaccctccgttgcggcggcggtcttcttctgcggcgagctcattgcggaatgagctcgagttttctttctcccaacgtgaagaattgacgaatggtcaatttcctgattgacgtgccgtgactcggcgcgtctaatcttgagggggggatggtgtaacagggttacacgcacaagtggctacagacacttgtaactcaaacagacacgacgtctgttagaggatcgaaagactttctcgaccttggtatagacacaccaaaggctacatacatttaggatcaccacgacgggtggtccatagagacttaggattcctattggctgagagcagcatctcttagccaatgagcgacatgcatagcgttggaattctgccaaccagccgttggcagattcccaggttagaatattacatttagaggaagtcagaaacataaaacaaaaatagcagttctcattttaacccaaaaacattatttggatcgtttatttagattaatatatactcggaggcccgagtataattaactctaatttaaactgagctacgcttcctcacatacacgcgcacacgtgtaagctaaatagtgaaccaaagtaggcccactacagttgaggtagtcacaaaggtgttcagaggactcgcgcttcgcagagtagtagcgagtcttcgcagactggctaaactgcgagcagtaatacttgataaacgcatcgctcagtcgcttccactgacgcttagtcctcttcgggagttgacggtaccagtgaagggcaccgtgccgaaggctcagctcgaaagccatgcaccactcgtttggtggagtgtgcgttcccttcatctcgtagacgaaagctcggagccactgcataaagttttcgctccgattgcgggcccctgagaatttcttgatctgcacgagcggccggtgcgtagcgatctcgagccgaggagtcgaattcagtcgctccatctcactcacttcgcgcacttgacgggccaactcatcgctcgggctgtcaaacccatcttcatagtcgatgttgtcttgtcgtcctcgtcggacgaggagtcatcacgcagtgtaaaccggcggcttaagcgtcgcgtggagcttcgttgcgtgctccgctcgcgtcgcgaaccttcggactcacgcgcaatacggtcagctcgattcgccgacctaggagtcaccatgtgcgagtcttggaagtacggcgaaccttcggtcttggcggagaacactccgtccgtcgcttggctttggtttgaccgctcggcggacttcttgggtgtctgtggcagtgagatcttcgaaggatcagcttgctccctcgcggggcgagcactcggggggcgtcccagagtcaggtccgactccccgaagctcaggcgaagcttcctcttccacttatgcagctccttgccggcgagacccggcgtccaactcttgatcgagacttcggacggacgagtccttggctcgcagcccatcgctcgtaggaggcataccgtgtcctcggccacctgagtaaccgaggtcgactcaacggggtgttgcaactcctccttcagctcagcccaagtcgcttgacgcgtcatctcgggattgaacggccatatccactcgctcgactccaccgagcaccttgttcgcagctggagtgctgctgttcatagcgggccgacttccgcgggattctggaggacccttagtaacctgcatcagagccctcgaagccgaggtctcggtgccatcctcaaagtcgtcatccgcatggtcgggtttcgccacttcatcaaattccgcgacgaggttccgggacaaggagcgcgagcctccgctacgtcccgcggacagcatcgcatcttcttcatctccgaactcctgcgtcgtcgctggagtcttctcctccaggtcatcatagtccatcatcatgtcatccttggcgtccgaatcttcgtcgaccgactcttcgaaactgaccgacctttcggagatcgtcgacaaccgagacgttaagtcactcgaaccttcggccgatcctcgtcccgacttcaccggcgtagctggtaccgctgacttggatcctttcgccatcttgttcttattcttttttcttcttcccttcttcacttcttctctcctcaatgatcgttgggcaaaacctacacagaccacaacacacaatcggtcacaccagtcccgggtcgcggcaccagttgtcgtgtaggaaaacacgagtttacgagtcctcgccctatcaaccgaagtctctaggacgagccctaccaacaacacacgccgtctccgaagagtcggcgatagattgtcgggataataaacctgaagaccaggtccgatcccttatacgggctggactgtgcctccctgtgtgttgcgggtcaggtaggtttacccttcgttaaaatataagagcacccttagccacgagctacggctaggatgcaatgtgtaattcgtactttcgcactaaacctctgtggtccctcagaaaggaagggtaccaggccaatcgaagcctcttacaggggcgccgggcgaagcctcggctagaagtcaaatacactggggggtccttgcctcacacccagtcaaacgtacaactgtacacagaggtctctaatacctcccaacactcggccacctactcactcttggccttaccaggatgaacactcggtcaatgcaccttatgctcaccggcagacataccccgtgcagccgagtgtatccagaccctacgctaagcttaccgacttaccgtagacggacttgacccttgtgtggcttggggggggggaattctgctctgtttaatggtttagaggctgtcgggcctctcctatagctaatccctaaggtctatacaaatatcaagtgtggaccgagctttcgagctgatcctacaaccggacgaaacttctccttaatccgaactcctactgggcataaagtgtacccactatgaaacttcggaggcctcggcaggcggtttattttgacccgccgagaccctcctgtcactccgtagtctctatcaatcgtctgggcactaaagcgcggggaatgtgaccgaccaatcaaagccctcggtcagccatcactcgcaagctcaaggcagttagacctcagccggaactcgcccggccgcagtcatttcccgatctcacactatataccgtttgttgatcgatgtgttgtggggtagatcttcgcaaggtgccatgtagtagtgggttgatcctttatacatattgaaccacttttcgtcgatatgtacgatgtcgtacatatcgacgaaaattggccgtctaagacctgtacaaaataaaagaataatacagcaacaaggttattagatatccaaccgcttgtacaaaataaaaaaatgctcatacctgggggttgccgaacgtggcgtagtgcgaatgccagacgtcgtttcttgtgctcaggcgtgagacgaggcttgacagttgaaaacctccggcgcaataaccccatttcaaggtagcgccggagggtggtgcgggagaccttcacggcggcagcaagggaccgctggttctgccgaagaggcaactgtggtgtagtagcacgcacaaaatcgtcagatgtggcgccctagctacaaacacaacaacagccgagctagtcggcccttgttggcctgcgctgagatgtccccagcggtccggcccttccgggacagtgatgtctcgtcctcgccgagaccaagtaccccaagccagtcaatcacggaagccagctgagttacctgactccggaattagaaatcccgtgctctccgccaaaggacggacgacggccctcgcgggcttttacgggtcgccgagagcaaaggcttctcgactcagcaatcagtgcccgggacgtacgggaacactggctcgcagcggtggcgagacttttccgtcgcgcttggcgagacacgcgcccaacccgggccgaccttaatctcttggtgctaccagtcaacaccctacaagctatgcctctcgggtgctgacagcagacataatccggcccgtgcaggggcttactggaagcgcgcgcacgtgttgtggacctagaaaattctgctctgttgtttgttatctctgtcgggcgccctgaaggggcgcctccactattcctaagctcctatacaaataccaaatgaaagtgggcggttttggatctcggccgactcttcaccgagctcggcgacgcttgagctcggctaagccggataacctgtccggataatcccttgaactcggctgagccggatacggcgtgtccggataacctggcgaactcggctgagccggataaggtgccggataacccagtgaactcggcggggcgactcgtgaactcggcagagcgacccgcgaactcgactgcgcaactcccggactcaattgagcctggttaccgtatcggacggtacatggtaccgtttagtctgagctcggcggcttgaacccccatgatctgtccagtgccttcctgaactcggctgggtcttcatcactgggtctgccacgtgtcaccaggtgtgccttgagtttctgacaccatcagccgagttcagcggtccatcagcgcattcttgcccactgagctcggcggacggtcatcccgccgagtagaacttggctcctggtacgttgttccactgcggccttggagtgtgacacaaaacttgatgttccctacaccacaattgccccggccatgctacgagcaggagtggtgagtggcctggccaaccggatgtgtcgcacgcttgatttcgtccaatcagctctgtcgcaaacactctgagttcacatttcccgaattcgagtgacgagaaacgcccgcaacgccatctcgacgccctcgttccgtgaaggtgagacttgcttgagccttgatctttggtataggccttgtctgatgcgtggcctccgcgcctcatgggtctgtacacatgtagatgcccctatcgctcgcaccaaaccccgtcgtcggatcacttcagcagcgaatcagcctggatggtcgtctcggcgtggcagccggtagcaggaactaaaccatacgaagtcagctggtgcccctgtcgacgctcggagtactagcggtgatgttgggcctgtcgcagcaaagcgagtaggtgacgcaggtgtcggggaagtgctcgattggctgcaataccgacgaagccgagcatcgctatctccgtcaaaatgagcagccatggatgctgccagcgactcggctgaccgggtaagcacgttcctctcgtttcggtgcgtcgagtgaagcctgatagttgtcttggcatgctacaaggcaccgggaactcggcaggtcaagaaacgcttccccgatcgggccgcgctgagctcgaaatccaacccagctgagcttattggcgagaagtgcagcagcaagttgaactcagctttgtccgaactcggctgtcctgacgactagctgctatccgctgaccttgaactcggctggacttgaacacagcctccgcttcatcgactcaactagcctggtaagtgtttgccccactcactttggtgcgttgagttagctctcaccgttgctgtgtcattttataaacgaacaaggcgatctcgatgcgtttgatgctccagtcgatttgtcctgaacgggccgagctgggctcattggtaaacagaccttgacttcggcatgtctccagctctgttagaccagcataccccgactgggctcagcttggttgggaaggtggtgcgcaagctcgactggaacagcacttcattcggtcacattccaactcggctcgccgcgagctcggctgcgttcaaactcggtttgaattcggtatcttcggtttagctgtgcagcgtgttcagactcagctcggctacacctcgaactcggcgtgagcgctctccaatcggaacatggtgcgtttaccagcactcaactcggcgaacttccgaacgcgatctcactgaaactcggcgtaccgcaactcagtccagtgtttccttccgttgaagtgagtacacttcagattggcgccatccaatccgcggcactgctggaactcggcatcccattccagcttgatcgcactccaatgttctcggcttcgcagcaactcagtgcgaacgcgacctcattcggacgcagcgtgatctcggtctcgcttcagctcagctctgctcggactcggctgcgcataacgtcggctcaacctacgtcgtctcggctggaatccgacgagaaccgggcgcaagaccgagatgtatgcgttcccactggaactggacgggaggcggctcaacttgatcgtggctttgcttcagcaaggttgctcttcaatcggctccactccaacgaccagcgcttcttcgaagcgttgctcgaactcggctccgttccggcttggttgaactcggccttacgacatctcggtgtcaaactgcttccacgcagagtgccctttctcgcttcaactcggctctgcttgaacgcatctcggctttagcttgactgtggttcaactcagttggtgctgacctcggctgcacttgtacctgatctcgattcagctcggattcaagacaaacctctgctgcaattcgcctaggcgccacttgatccccatgttttgtggctctgccacgaatcaacccgggctagctcgactgatgtccacctggcattgattccgcttcagcttagcccagttgagcaaggtgataggcaagctcggctgagcgaacgacacagctggctggctgaccagctcagtcccttggcggaagtatccgcgctttgaaggcgtgtttcgactcggctatgctcgacccctgaccaagctctgctcatgttggctcaatgtgaataagacagcggtcgcgtggaatccattcctcttcagtccagctttggatgttgggtacacgtttgcgacgccgtgactcggcgatttcaccgactcggcttcaggctgaccgcagttaaactctgtggtagccctacgtcggatcgattgaagtcggagtccatcttcaaagcaggtgtctgcttctgctcagctacggatcaactcggatcccgttcgagatcgctggcacgtcgacattctcgacgacgcgcctgcccagcgtgcctccgctgagctttgctgaagtccagctttgctgcaacttcggtttgttcaccgccgccgcgcatcgaccgactcggctagtcgcctctcggtaaacatggagtgaatacggcctcactggaacatcgtgcgaactcgacttcgcttcggctttcctgcttgagcgtggctccatatcagcacggcttcgcgtcagcacacatgcgctccaactcagcttgagcgcacaacgggaagatcattcacggacttggtcggaggtcccggcggtcgtacccaagggtgtcgatcgtaccgccgcatatcacactcagcgccccagtgggtagcgtgttcacgggcccagtgacgagtcgacacagcttcggcatcgacagctgactcgcgcaatctgtgcagacgcaccatcacctccctcagcttcttcacagggtcgtcgtcagaccagctgggctgaatcgctcagctcggcaaatcggctgagacttcgatccgagatgcggattccaccagcctggtggctgtggcggccgtaccgattccaacgctaacccggcgaatgggcttcttgctttccagctccatcttcgctcactctatttcgatatcatgtaattcatataatccatacagttgacgcagtatcattcttcgactcgacccagcctgctgtcttcactgagtcggcggatcatctctttggtgcaatagccttagaccgcatctgcaacttgcaccatttgcagacgggtttcgtatttcttcgattgcccctagtcgagtggaaaggtttcccacgagacgttcggcaccgaatcccaactcgggcatttcgcgcttgatgccctcgtcgctcgttgtatcagaggcagacggtcccctgaagtgacgtcttgactgtcgtcgtccgcatcgccaccgagctcggctgcgaggttttgttgggctcgtcgaggtttctccatgcgcccaacatgcagcgagaactcagctgccccgctgagcaactcggctttcttccattcttcatcataatctccaatatttccatctcttcctcggtcttgggtgcggtcgtcgtcaaaccgaacggttgggaccgcttccatcgtcatgtcggcgatctttccaccagctgagttcggcttcgcgtgaagcgagcccccagccgacgctgggctggcccagctcggcaacgttctccccttgaccaccttgctcagtactcgaaacttggttgacttggtaccaacgaaaacaaatcaccctgctcccggatcgcggcaccagttgtggtgtagtagcacgcacaaaatcgtcagatgtggcgccctagctacaaacacaacaacagccgagctagtcggcccttgttggcctgcgctgagatgtccccagcggtccggcccttccgggacagtgatgtctcgtcctcgccgagaccaagtaccccaagccagtcaatcacggaagccagctgagttacctgactccggaattagaaatcccgtgctctccgccaaaggacggacgacggccctcgcgggcttttacgggtcgccgagagcaaaggcttctcgactcagcaatcagtgcccgggacgtacgggaacactggctcgcagcggtggcgagacttttccgtcgcgcttggcgagacacgcgcccaacccgggccgaccttaatctcttggtgctaccagtcaacaccctacaagctatgcctctcgggtgctgacagcagacataatccggcccgtgcaggggcttactggaagcgcgcgcacgtgttgtggacctagaaaattctgctctgttgtttgttatctctgtcgggcgccctgaaggggcgcctccactattcctaagctcctatacaaataccaaatgaaagtgggcggttttggatctcggccgactcttcaccgagctcggcgacgcttgagctcggctaagccggataacctgtccggataatcccttgaactcggctgagccggatacggcgtgtccggataacctggcgaactcggctgagccggataaggtgccggataacccagtgaactcggcggggcgactcgtgaactcggcagagcgacccgcgaactcgactgcgcaactcccggactcaattgagcctggttaccgtatcggacggtacatggtaccgtttagtctgagctcggcggcttgaacccccatgatctgtccagtgccttcctgaactcggctgggtcttcatcactgggtctgccacgtgtcaccaggtgtgccttgagtttctgacaccatcagccgagttcagcggtccatcagcgcattcttgcccactgagctcggcggacggtcatcccgccgagtagaacttggctcctggtacgttgttccactgcggccttggagtgtgacacaaaacttgatgttccctacaccacacaacggcactgctgccaccttggtggcgatgtcggggtggtggatgccgcttgattggcggcgatttggctgcaacagcacgtctggcgtgtggcgcaagtcccatatgcgcgcgaccgtgtcccggtgacacaaaaagtaacggctggtggcggccttggcgcctaaggggagtcggccacccacggctaggttcgagaggtggagaaggatggcgagtttcttctgagaggacaggttgggctgcttggggtgacgtcccattgtgatgttgagtgctcggggcttggcgggaacttggtttgtgtggtgcccccccgacgttttagcgcgcgctaagtaacctaaccctaacgtatttttgacaaatgaatgtgagccctgaaaaaacctcgctatactaaaaacctcaatgttgtttcttaggtggcccagagaagtagcatactaagtattgtgaattccggccataattgcgtattggggccggttggacgaatcgcttctctacaaaggccaagttatttgtcaatcgcccgagcagcagcagatggtatggagtgacccttcaaatcgcctgaggaaattttgagtggatcccacaatacacgcaatgaatattcgccactaaggtcttctgccagtttcgtgccgtccttcgaacttgcggacttgctgtggcataacttttcattgaattgtccattctgaaatctgattgcacccgctaaatctgcgcgattgggctgattttatgtacttcacgctggtccgtgtaaattttgcagaacttcttgttattgttttgaaaagcttgttgatttgagtgagctgccagtttcctgcctctttttgatagcatttttgtatgctatgcaaatcctaggaggctcatcaccggaaattgcatgtgacgctggaaaaatctaccaatagactacgagagtttaacaaggagaagatgctaattggctaaaacaagtaggcacggaactggttgtaggcacgcagctggcaccttaccttacagttactacttctataggtctctagtgcaagtactaactgaggttggattgacatattcactacggtgcactaactttaaaaaaaacatagttaacttctataggtcagtgattaagctgaaatagaaggtcaatttacaccgagaacttaatacagagaaaatatgcaacttacacactacgagccgttaatgaaattggctacagaactctacgtgtacgtctgttgcgtgcatctctctctttctcgttttgttcacctattaatgttgttcagttcgccgttgaagtggcatcctaccgggaaggtatcttgtttcagcatgtttcgaggatgccacacttgctgactacagccagccactccaaagcactgatacacacgtagactactgtagtccatcagtgtttttcgcacgaaatactgtactgcgccgctaattgcagtatacagagtggcatcatgtacttacgacccccacggaccaataatctgtgatattgaactggttgcggcctcggctaaagtcacgtgtgaaggaagcccctaaagctgctgaaacgcgtgaatatcgtaccgttcaactcgtatctactaaactggatgaggggaatgcaaacgagttcaaggccttctagctgtcgaacttctcgattcctgtggaaagtgaaggaataaagccccccgagcatgcagaatggtttaggtgctaggtttaccttgcacgggcttcaaccagagaaacgtcactgaataattgggtattggagtatttattattattattttccgtacaatgcagcgaagataaactcggccgcatcccacaccacgagatgtcactatagtttagcaactaacttcgttgtggcagtgtaataatactgcaatgaagtacaggtaacaaaaacgatttccgttatacacagacagatgtaaaaaaaaaactgtgaatcctcggagccctcagtccagtcctactcagtagtttgaataatctacgtagaagctagaagctgaagtcgacgacttcaaccatgacttctgaacgacaggtgggatttaagtggacacagcttggcggccaagtcaacaggatttccgttattgtgcataacgggccactttgattgcctgctctcgttgctgagcattgatctcagtggccaatggcagctcgcgctttcgttttcattaggtcatgagagttttcaagtgagtgtgtacctttgctctcagtgcaggaaatcaagtgttcctacagaccaagactttaccagtcttcaaaggaaagtggatcaagttattgttgtaggatgcgtggtgtaggtttgtttgcgctaaaacgaccctaaacgtcctatgaaaactgagtgagcctgagggcaatccccacaacagcatatatttataattagcgtattaatatagaacatctgctggaataggtggtaaggttagtgctgctatcgcagaccaaattgaattatatccggggtacatcaagttaacagaggaccccacattttcgtgaaacttccatcgacgaacccactgcgcgttttatgcgtggacgattgcgctgccaggttgtacggaatcaaccaattcatctgtaaagaacgaccctgagactgagggcgccactgaagtcaatcccattttgtgctgagatcctcacttcacaactttcccgcaagtgtcaacaacgtccaagcatgcacaggcagtgtgcgatcctgttcatcttctccgtctttctcgcgacttttggtgtcactttagcgctcgaccaagcgaacggaggtgctcgtagactgagatcactcacggcccataccagagccaagggtgggggctttgaagagcgagctggtattcctgtgttgcccaaaatcgcggagcaggcagcgaagatacttccatcttcgttcaacctcgcaaacaaggtgtggctcaagtctctaaccgacccgagggatgtgttcaagacgctgcgtcttggcgaggctagcctgacaaggctcgacgataatccgaagttcttgcagtggctcaagtatgtcaccatgtacagggctaagagagagggaccctggttcacggacatcagtgcgcttaatctcttgagaacgacgacgccggatgcggagctggtagttcttcttcagtcgattaaactggtttcaaacatgaagaaatcagcagagacgatgcagcgatacgtgcttgaaacttcagcgcccgctatacacaggtggatgcacgaggtgtggctgcgtggaggagaaactccgcagagtgttttcaatatcctaccgaaggacagccccgtgttcctccagtggctccgcttcactgagaggtacaaagttaagttacgtgaaacttcctattctgaccgccaaacgctgaaaatcctgctggagacaagacaacatgcaccggagataaaactggcgagttttttttccagtcacttaagacgattccggacctgaaaagcctcggcgacagcttggagaggaatctgttccaaagatggatgaccacagtgggttatgagccaaaggacgtcgcccgtttgttgaagattgaagaaaagttccggagctgcccaaaagtgactccggatacaaacttttggaggcgtacacgttgcagtttgcagcagagaagagcgggaaggtgacgctagagaaagtaaaaaagctgctggttgccaacaaccttgacgctgccttaacgaccgccgtgaaagctcgataataagaggtttgaaaaagcccccttttgccgagtatcttggattttgcctcagtgttcgtgtggccgtcaacatgatctatttcatgttctctgatctttattgtagagttaaggagcgattgccttacagctcatacctaaccgatctgattcatcgactctagctgtgcacgaagaagctccaagatttcgtaggcggagtccacacttttagttttcaattttgagaggagagcgagcaaatgtttgtcttcgtttacttctatgtttctctattcggagtgctagaatcactgaatcttcgtacctttgagcatctctgcgtgccattgtgtcgcgatgcccttcgtttctggcaccttcttggctgcctccaacatgtttgacacagctttgaccccgtagaactccgtgaatacccccaccaaggtcctttgttgatcaggatacttcgagttgaacagatgcagatagccactgagcattttcacgttcgggttcatcagtagcttgtccactccttcgtccagtttcagcagcttaagaatcatctttggggtcttaatctggctcagccacgtgttcaccatcttgttctccaaattcaaagcaatggtccccatttccccggcacggggggccgcaagaaagatcttggacagcccatcgtacccatatttggctttcaatgccgagagcatgtagtgctcgggggtatgcattgccatctttgtatatcgaacccacgtcttgaattggggcgtcacaaagaggtcggatcccgccttatccagactcagcatcgtgaacacgtcgtctacagactttccttggaggctccacgtgtccagcaggtccgtccgcaagcgcgatgcgattttctttgtgctgcgggagatcgctgccgcctcgagcgctttggccacggcctcgtctccgtaggtcttggcgaacatttcgaccatagacacttccttcgaggggttcttcttgttgagctggtcaatgtaggcggcataggtcctcaacttagggttggccagagcctgttcaattccggcattgagctccagacggttgaagacgctcgccatcgagtcatctttcttcacccactttttgacttgcttggtgtcgacggtggagatcttggtctgctgtgagcggttgagccatctcacaagcctcagtttcattgctctttcctcatccgctggcagctcggcgctcctcagcagcctcgagggaggaacatatcgaccgttggtggcgatggaccggagatgcgaaggtgacttggctgggtttaccttggcggtggcagactcgggtgcagcattaactgctgcgaggaaaacggttgcaagtaatagcactgcggtgcagtacgaacgcattgctgctgccgttgccacttatcggtaatggacctttacgcgttcgagagtcaatccacaagtgagagataacgtgagctctgccaatactggtacgtgaccatcagtgcctatggcgagtcaacgataatacgaaagtaacgatcgcaaagtgcaatctttgagacgggatatcttcttgtcgcaccgtatttaccacacaatttataactgcgaatacgtatctcaaatatactgttcgtgatcccaagattgcagtgatcacagctaggatgggacttttttctgttgtaattatcgtcttgtggtcgttaccgtaacggaaaatgtacagcccacgttttcggattggagggggtgaaatggcccgcaaatctatcgtgatgcagagtccaaatcggcatcagtggcgtttgagaagcatgaacaacccgcaaacgtagccccgaagcaaggcttaggtctacagttccctgcctagcgctgggccggccttctaaaggttttaaggacaggtagagccacatttagcagctcgattacccagttcccaaggatttgcaatagacttgagtgccatgacacccgtcctgaaaaccgaaacatggatgtccatgatttcagcatgttttacgtgtttggagatcttacttggttttagcatgcgtttatccctaaccctatttcgaaacatgggctgtagggccagccttaccgtaactctctaagttttggccgagtttaggtgtcagaggttacgcctgcgttaaaagtgtagctagcgttgaagtgtgaaatacacgtagattttgatttcaccagtttcttacttgtgcttgcgaggccccgcttggcttgtaaaatagtagttttggataacaagtattgtggctttcatccttttcgtaacttggagtcaactccgcagacgatggccgtgcgtctcggcttcctggcgctgttaatagcagtagtcactcttacggcaagcgccaacgcagctacgagactccaccaacccaccgccgacgctgctcagaggtccttgagggccaccaatctggacgagaagaggggcattctcccggacttgacgaaggtcaagggcgccgtcgccggggtcaagagcagaatcgccaacgccaggctcatccactggctcaacgaccagaagtctccagattacgccttcaccaagctcaagcttcaccgagagggggacaacctcttcaagagccccaagatcaagctctggatcgagtacaggcagtgctacaaccagcagctcggcatcaaagactcgtcgggtatcgctacgtccatgaaacactacgacgataaaactctgtctcgattgattgacgaagcgaggaaggacctgccgactggtggcacgttattgggattggctgcggggggagatgctctaagagcatcttagtacttatataaaaagtgatcttatctatttacgtgcctttgtgaaccctcaacaataattagagcatacaaatatcgggtcatgcataatgaactgggagaagttgcaaagcatatgggatgaaagaaggataaagcaatgaggcaagcgacatggcctgctcactccaaagtttggagtccaaacaacgttctcggctctgctgctccctcaaatgcatgaaaatgtgaacaaactagatgttcatttcggattatttcttactatttttcgattcgatcgtttcatcttcgtgctccgtgagcggtaatgttgaccagaagcaatctacatctaacgttatgctgatggagcaaccaagccctcaaaccttaatgagcttacccctgtcgacactgtcaaaatatgttccagcgttccagcgaactgaaggtggacagcgatgaaatcatttcggctcttcagcgactggacttcgatgcacctagaccaataagtttactccaaccgagtagttgtttagattcagcaccaataatcaaggtgtccaagtagttattactaagagtgttcgtagctagcgaaacggcatgtccacgaactacagtagttaatcaactccttcttcttcttctgcttttgccgatggtatgtatggtaactcgtttttgactgccattgataagttggcgaatgaactgcccaagtggatgttttcccaagttgggatggctcccctgcagcaaatgttcttcatctgcgcgctggacgctcaacgagatcttacatattgcctagtcggagtggaccagaaccactgcatttcccgcccacctgcgattttattcaattttagtactaatgaggtcaactatgtacaaaatctcaaattttgccagcttcctcagccagcgaggcgctcaccgaagatcagcagtttggtggtgtaagctgcggctgtgacagatactttcagcttcgagcagctatttatctgcctatgcacaatgatcgatgacaccgaagacgagataaaagatgaatggcgtgtccaaatgtgtagtgtagtttgttgaacaggactgactacacctttgcccggccatagttggcctaatttgcaagcaaagttgtcatgaatattggaggtaccagagagtaacattacattccctaaagtatgactttcgtttcattcaaagttgtctaattcccatcgagaggtacatgcaccacatgtagccgcaaagcacgtctcaccccctgctcagtgaggggcggtctcaacgcgcccccatgttcccctccttgagagatcgcgcgcgtacagctgccgcttgatgaagggcatgcagacgcggatcggacactcaagaagctgcacgcacgcacacacgccttcgccttcgccatcttgcctctgtgctggcgtcacttcgcagtgcgaagttcgcactctatcagagtacgccaaaggtcttgagtttgcgagggaaaatgtgtattacgtcaacagtcgttggtgggaattagacaactttgaatgaaacgaaagtcatactttagggaatgtaatgtactctctggtacctccaatattcatgacaactttgcttgcaaattaggccaactatggccgggcaaaggtgtagttacacttttcttaaatagagctctcctattttcaaataatccttcttgagtcggctcacaactagcaaatgggcattccttcaatcttggttaactgtcgcgactggatactagagttcgttttactgggataggaagcaacgatagtgctgctatcgcagaccaaataggattatatccgtggtacatcaagtcaaacgatgacccctcttaacatctaactggtatatttcttgaaaccggtacggctctggtgccgcactgggccctccaaaaggtttatatgcgtgggcagattgaaccggtatgagtcagtaacatatatcgaatagtaggagtgaagtaaagtgaatgattgaagcggacgaactgctgcagaagcatacatttttcattttctacaagctacaaacagatctcgagcaaggttcgttttatcactgtgtataagcactatctacaattttgaggtgaattaccgggcagacgaagcaggcgcaggagatgcccgtggttcgtaaaaaaaaaacctcataataatagaaagcgattataccaaaaacctcctatcccagccttcgcggagccctagtcaataaccaaatactaggtccgtagatatagcactcacggaaacacctatgtattgtacatggtcccacacgtgacagctttcggtcattatgaagggtactacgtcttctatccacgcaactgagacacacctcacaacaaaacataggttccaaacggagtttatcttcagtcattgaggatgagaccaagctacccgcacctccctaagagtgaaacggtaccattaccgcgagatcctgaattgcagttttcctctcattcagcaatgttgttgttgaatccagctgcaccaatcatcatatgtatatatattacttatgttgctattcttgaggtcgtgtgaacgctacaagcttcttgcaattcttacagcacttctacaatttgattggcatcttcgtagaaatgaagatcctccccaacagtgaaatagcggccatcctaaaacttcggctagaccttggtcttcttggccgcctgcgctatctcgtagtttgccttatatacgtaccaaacaatcgcattcggctcccgcagtttatccttcatgcccagcagttcgagaaccttctggggggtgaagtcttggtccagccagttcttaaactgagcgttctgtagatttgtggccatgaccttcgtctctcggacgtgcttcgccgtctccagcatcttcgacagtgcttcatctccgtaactggccgtcaaggtcgagatcatggcccgttccggcaccttttcgctgatgaagctcgtgtacagagcccacgtgttgaactcggggcgtccaataatatcatcccctgccttgttgagcttcagcagcatcaaaatatcacccgacgatttacgatccagacgccagcgatttagcagatccgtctgcagctttgtagcgatgtcttcggttctcgggaccttcgtggctgattcaatcatcctcgctaattgcgcttcatctttgtatcgagcctttaacagcatcaccatgggcacctccgggttcttcggcgcgcttgtggtcacaaacgcggcccaggagctaaactgcggggtgcgaaacagattctcgcccgcctcatcaagctttagcagcatgaagacgtcgtccacagtctcgtggctcttcacccaggcttggatccgcgaagtctccaatttaccggcgatcttagcggtcttcggcatggccttggcctcgaaaatcatcttggccaggacgtcgtcagtgtagcgagcccttagcgaggcgatcatggcctcctctgggttcttcttgttgatcatggccatgtatttggcccacgtcttgaccctcttagggttgtcgaagaggttgacgcccgccttgtcgagcttcaagagggcgaagacgtcttggtctgggcttgcttcagctggttccggaccttctcggtcgacttggccactcgcgtcttgaccagacccgagagtttgtccagcccgcccctctcttcggtgttcgcgtcctcgtcctcgacattctcttcgtccttgctactagcaaccctcaaggtccttgactcaggttgggccgagttggctccaagtcaagcgccgctatcttggagatcggctgcacctcggacttgggggctgcaaacgcagcgtcaagcgtggcgagagcgatcacgtctcataccccacacagaagacgcatgtcggtaatcggtcagtggtcgagaagtgagcgaggggcccacaacgaccaagcaatttgacgactgaagagcaaagcccaggatgtggggacctgtacggtacagcacctggtcgcatgcattttgtgcggtcatatgcctgtcatttcgctctccttgctctggtgattctcagggctttattggagtctaccgtacctgcagaagagcaaatgtggagtaattgtatgcatgtcttctttcctagcaactgtatggtttcactttttacctatacttatatctggagctcttcagtgtacatacagtacctatccaaagcacaatatgttgtttacagctatacagtgctgacaactgcgtctcgagtctgtggccgcgagggccattgccggcttcttcatccgtatgaattcacccaagctctattcctagtatcgaaggtcgagcttttcttctcggtcgaagagcggctaggctttgacgtgatcccacgaaatgaatccttaaaagtttgggtggtgctgtcttcaacttcccatatagcagctctggaagttgaagcgcacacccagcagcaggtgatagcagaagggtttcactgtgttggtatccgtacgttgaagctgttgttcgtggcgacgctgatacaggctatgctatggcccgagcagtttgttcgccttcacggcccaccgacagcattcctgccacgcagctattacgtacatgtataatgctaagttaccgtaacttcgtcttgattcgtattataccgtacgggtagacacacgttattgctgcgttgtccaagagtggtctcttcaagtcgctcgaactccacatacaaatgcttaaacgcacgaaacgttttgtggagcggaaccgtctaccgtagatctcaccacgatatcctcgcgcgatacttaaaaaagtagccatgttcgaaaactgtaagtgccggtattgttgccgtaacacagaggaatttccataaatcagtgattttcactgagatttgacaaaatgattgtgatagtttgcctgaattcactgatgcagcatcagtagtatcgtactagcgcgtcaatacaatttgcaagtcaaatgtagacctatagtaatactagaaatagtacatgcagatagcatgttacctactacaactagtactacataatatagtattactgtcgatgttattaatacatactccggttgctacggtacagtagacaggcgaccccttcctctagcggttaaggtgtgggatgctcgcaactaccagccacaaactgggttccggtgtggggcttgctgcgtttagtgcctttttggtggttatactttttgcactatacaacttgtctggtgttctgcacaaacattaaagcaactttattcgttggtcgtctcgaggattcactgcgaaatacaagggtccaagcttctccacaattgttttgcatctgccacctccgccgaaacccagcttttttttcgcgatagaacaacgcatataagctcaaaggacccaggagatggtgcattcactaaaattaaattgtcatctgcacaacgtattggatttcatgcatcgatagtagcttcagatgaaatatgttatctttaattctgggatagcagtaaccccggagggagtgctatggccagcccaacacagattaattaggcggcaccttggtagctgaggccggtaatactgaagccggaaaactggccccggtaactgaagttaactgattgtctacgctctaattcgagacaagctcgagatggatggaagacagctcgaaagcgacggcttaccgcgtaccagtccacacatcggggatcagcggtgccacgaggccgtaagtgatgcaaattcaactacatgtattaatatcacttgacaggtgaggaagtacaacgcgcgtttttagtggtgcacctccagccgaacacacgcaccaagtacgccccgaacgatccgtcacctttttaaccccctcgcactcaagtgcatctagtactacgttgctgaggtggctactaaaagaataaagaaaaaaagtttgcgtctgcagaagatgataatggtcgacgggcgaaaagctcataaatataaaaaatcctgataggctctaagtcaatgtagcagatgctgcggctgcgaagcaggcgcaggagatgcgttgtaatggaaagcaaatttacattccacaaatactgtacataacatcgccatagcaacaattcaacggtcgcgcgcgttgaattgccggtagcgatagtgacggcgcggccgcggtgaagatgctcacactaagttctttagctatcccagcctatgcatagctctcgtcttcatttgatcggcttcaaatagcgctttactcctaccccagaataaatgtagtatgtaaatagaaacatcttaccaaaaaaaataaacgcagttcgtgtaaaagtctcgttgatgatgatattatattgtgttgtgatatagtaactactactagtgtatcggcaactcataaactggcggattcccacaacgtagaaagacaaagtcacctgcaaacgttgtgtgcgtcacaaggttttcggttcatgttcttagtttaatatgtcggatcccatcggtactcagttctttcaagtctcttaccgcggcaactctgctcggttgtgaaggggggaaacatgtcgacgcatagttaagtaggctacggccttcgtcgtggtgtctgcttccttcacatcgactggggcattacccaacgagagcctctcggtacacttcggaataatatagtaatcgaaagaagcgaataaatactactgtagtattactatttaccaaatcactgagtcagtagtttcaagctatgacaatcattttgtcaaatcacagtgaaaatcattgatttatggaaattcctcccgtgacacaccgtccggctgtccactgcccatccgattcttgccgaaagtaatcgcctgaaaaattatcttcaatgcagacttctgcatccgcctagagcttgcacgattgtagcattgtacggtacggtacggtactgcgcggagtcgcgactgccacttccagagacgccgtcacgatggacttttcccaatcgatccgacttcctccagatgaacagcgccaccggagagagcgaccgcgacccgtgagtatgcgcgagaaaataggagcgagatggcgactgacccgaccaagtgccaaggccgccgagcagctccaagtggttcgaccaaaggtgagacttcgagacgacgacgcggaggtattccgcaccttggcacacagcgtcgtgtctcgaacgctggcccacgagtgcgagtaccgtcgccaaggatccccggagcctggcacacacgagtggaggttaatcaagcgccagaacggacttcgcgtatacaagagtcatgagaacggtctcgctcggctgccgaccggcttttgtatcggaaccatcgacggctcgctggacgacgtcctctacgggctgcacgccaagacccgccacgagatgcgcgtggccaacgcgttcctgagcaaaggtcaggtcaagtgcgccgtgctgtcattgatcgagagcgggtcggatcgggacccgtccaagcagctcgcgctcaaatggatgctcacacagacggtcggagacactcgctacgagaagtaccgcgacttctgcacgctggagtcgatgggcacaggggtcgacggccaaggcgaacgcttcggctaccgcttgatcaagagcgtggacctggccgagcacccgcagctggctacgggtgacgacgtcgttcgggccaagatgaccatgtgctgcatcttccgggaagacgcggcgtctcgaactgtgcgcgtgtactccaaagggatgctcgacatggtggaggacgtgcctccctcgttcctgtgcaatagcgacgccacctgcagtatgatgttatccatcgccagcgccacggagatcgcggaggccaaacgtctgacgctcctagcgctgcagcgcgtcgagtacgttgcttgctcgtcgtaccggaagtgtgacgagtcggagctggaggaattcttccgcgacaccgagtcgacaacaactacctccccgacgatcacctccccaatggcgccaacgagtcccgacgccggtcaacgcgggtccttccgacagaaatcgtcttgtgacacttgctccgtgtgcggcaagaggccgccactgtcggtgcttgtccgcgcgtcgctctgcaactgcggcgtctgccagcagcgcgtgtgccacaagtgccaagcaaagcggcgcttgttcgcgcgctcggatgccgtcgccgtggcgtgctgtaagatctgcgtcatggcggccaagcggctgcacgtggaccctcgagatccgtgcccgatgctctcgtcaccaccgatgtaacgttacgtcgacccaccagcacagcactggtacagtatcaacaacacaagccacatcaatgaactacatgtatatatggcgcatcaattcgcccgccagttaattaatctgctgccgtgcatcactgcagcccgccgaccaggaacatggagaggtaggcgtgcatgaaccagaggtagccgccgacgaacaccacgcgctgcagcagcggcggcaggatcaccagcagctgcacgacgaccccccaggaccacatgaacaggtacggcagcgtcagccagcgccacacaggccacatcccgaccgccaaactgcagcaaacaagatcattaacgttagccaccaacgttaacattccactatgcactaaactggtagtctatgtaccagaagccggacgccagcatggacgccagcatcccgtgggtcgccgtcttggccgtcgcgtagtgcacgcgctcgcccaggatcatgccgcggtagacctcgatgtacgcgccgaagagccccagcagcgaggcgaagagcacgcccaggtgcacgaactcgcggcgcgcgtggggcgcctgcagcagctccggcacaaactcggcctcgtacagccccaagctggccacgcccaggaacgcaagcgaccagatacggtccagcacgaactgcacccagctctccgcctgctgcgcgcgccgcgcggacgaattcggcgccgcagacaccatcgggtccgtctccttgtccatcagctcgtcggcgtcgtcactgtcgcccacgcgcgccgagtgcggccgccgcggcgtcacctcctgctccatggtcatcatcttggcgcagagtaagtaaaactgaaaatggttaattgactacactgtagtcacgatattcttcaagacagctgttgatttgtataattgactagcggaatatgtaaattgactaccgtatttatcaagacacttgttgctgcacccgtccaccatatggaaaactaggctgtgacgagactattgtacccgtttgcgcccgaccacgaccgtcaagaaccgaccaaaactgaagcaagttgtatactccatgtatagaccggttagatgaagaatgttcgagaaggcccaatgccgaccaccaaagcgactaagcacttgttacttgatgttaaagagggtaggacactctcacgttggctctcgcctgtggacttagcaacggcacttcgaggggcgccgctgcgcgacctgccccaccccctcgagccttacgctaaggcgcgttcttaagttcccgggagctgggaccgggacgaacgggacgatacccctcgtccgtcaaacttgataattgtaagcattttttaagcccctaactctcgggaactaccgcgaactaccgcgaactacggtgaaagaagaacatggtcagatagccctttcgaaacgtaacaaagtggtgcacacttggcgcgcattagtgcaaaaatgaagtagctagggcgaaagtcccacgtcccgaccacgcgaaaatgatgcgggaccgggacaaaacgagctcggaaataaacctagcccgctttctgaaagccaatcaaatcgctctatttcgtcccgggacttgggaccgggaacttaagaacggccctaagtcctcggctcggccaggcgaggtatctggattagatagaaactcctacttaggcataccttccggcccacgcgccgaacattgcagacctatgctttgcttcggttgcaaatggtctctctgaggcctctaagtgaaatgactaagtgcatagcttacggggagcgaattttcgaacagtacaggacactacacatctcggacagtccattacattgttttttccatcgttctcttacgttaactcctaccaacagctcgcaagattcttgtggccacgccacgagctgtagtcttgtacaggtaaacaacttgagcgcatgcgttgaagcaaacaacaaacaccaccaccggtacccgactgagaacaccgtcacccgtcaccgtacccgactgcccaactggaagcttattttccccgactgataccgctgtacccgactgacgatagccgccctcgaactgatcccaaacgctgaagtctcacgcattctgcttgcgctctttcgcttgttctcctgataaagctgtttgaaagcggagcaggaagtgccttctgtctccgccggttaaagctggccgctgcgcgtacagacacgagtatgaatacaccaagtgatgcatagatctcccccgaacagttacttgcctgacaggactgagaggtggcctgatgctcgtgcatctcttcaaacgcgcgcagggaggaaaggggggggggctctgacgccttttgtgttgcgccgaccgcagtcttgccagccagccagggagcgctccacgtcatcgtcgccacgaggtgtcgctgcagcaccactaggcgctaccggtagtcgtcgacatcatgcgcatgcttgtacggccaacagggcgaccgcgcggcggggggggattcatgcgtgtggcggctcgccgcagttttaggaatgaatggttgaaagtcgaaagtataccgcgtatacgaagctcggtggaggtcagaagcgtggttaggttattgatgcggatcattcaaaagatgactccagtggacgggtgcagcaaccactctcatttatcaaactcgctcttcaaagcaaggatatggggcccaaggcgacgccggcgtccaagaagaagaagccggcggtggtggagacggcggcggccgtggaggcgtccgccgtgtcggcggcgtccgcgcgcagctgccgcgagttcgcggccaacaagaagggcgtcttcttcctcacgttcttcagctacgtgctgttccacgccagccgcaagagcttctcggccatcaagggcgagatgggggacgagcagtggatccactcgacgctctacgcgcgcgaccagcaggtcgagatgtacggcctcatggacacgctcttcatgggcttctacgcgctcgggctctacgtcaggtgcgcgggggcttctacctgttatggggtcgcgttcttaactgatgtgtgacgtgtgtgctgtacccatgttgaagtggcatcctcggagacaagcacgacctgcgccgcatgatcgcgggcggcatgtgggccacggcggccgtggggctgctcttcgggctgggcgcgctggccgacgtgcacgcgctgagcttctacgccgtgctctgggggctcaacgggctcatccagtcgagcggctggcccgccaacgtggccgtcatgggcaagtggttcgaccagcgcgagcgcggcgccgtgctcggcgtctggagcggcaacgcgtgtctgggcaacatcgtgggcacggcgctcgtggccgtcatgttcgcgctcttcgacaggaccgaggcctggaagctcgcgctcatcgcggcggcggcgctcgtggccttccacgggctgctcgtgcatttcttcttgtacccggacccgaaggacgtgccctaccgccatgaggcgctggaggaggccaagccggaggttgccaggaagaaagacgacccggaggagagtgccgactcggacgaggatggcaagcgaaagggcattggattcttcgaggcttggtgcatccccggggtgagttttaatgctcttgttcttgatggtgtcgtcctttgactgatttgttgcgcgctgcggtgttgttgagcaggtcctggcgtactcgatgtcgtacgcgtgcctcaagtccgtgaactacgcgctgttcttctggatcccgttctacctgacagtgtcacttcacatggaaaactcggaggctggctctttctcggttcgttcccgtacttgtgattgatcgcatcggggtgatagaggctaatcattcttgctgtagatgttgtacgatgcgggccaaatttttggaggttttgtcggtgggatcgtttcggacacgatgggtgtccgatcacccgtcgtcgtgacgatgctgctcttttcttggtatgagaagtgtccgcttcattgttgctgcacgcgttttgtcgtttgctaactgcagtatctgtgcgtactaccagcattaccttgtacttcatggatggagcttcgtacgggatgacagcgctactactggtggggtcaggatttatgctgggtgggccagctaacctgatcagcacagccatctcggcggacctaggtacccatgagagcatcaaaggaaacgcggaggctctctcgacggtcacgggcatcatcgatggaactggaagcgtcggtgccgcgttggttcaatatcttgtgggatacttggcgaactgccagtacgagccgaaaggctgcgaccccaagagccctcattgtgtgcaagtctgctcatgggggccggttttcgtgcttctggaggttgggaccgtgctctcgtgcgtatgcctcgcgcaacttttgtaccacgaactgctgctcatccgtagccgtcgccgctactgcgctcgagagagctagcagtacgttgagtccctcggtggttatcctatgagcaggctacagcataaggtgttcataacggcatctaaatcaaaatgcagtctattgtctttctaccttacttactaaagtagacaagaaataatccacaatatctgcaatgtgcgcccagtgtcggtatcatgcgcttacgcggcattcgtgatgtatttcttgttgaattcgccaaggtacgttctccaggtctccctgttggtgtcggtgatcttcttgcccacccagcagtttgaagaccgtttgaggatcttcacgattgttcagccagtaggtgcgttgtccaacccgccattgctctgctgcggtcttcgtggggttatcgttgctctttaacgcgccattaatcagcagcatcagatctttttcgtcgtagtgattcaggagcgtctccaggccgtagatgtcgtccattttccccgctttcttgctcatgagctcactgtaccggacataagttggcagactcgtgccttcgaacagcttcgcgcctgccttatcaagtttcaacagcgaaaaaatgtcgtccgtagatttcgcaccgctgaccaactcgtcgagctgagcctggagccgctgaccccgtggagacgcgactagcggcgcaaccttcgacgatgccttcgaggcctgtttcggcttgaaccagttcttgatactagtattggtgacgaagttgagattcgccctctcttcgctgtcgtcttcttcttccgcaaacttctccgttcggagcgatctcttcgtttcgctgtcactcgtgagcagacgatcaaatggggcattgggttgcaccacctcggactccgtagtcaccaacgaagcttccgcaatggcgaccagagtgaccgccatgaatagcagtacaagcagcatacgcatcgttgctgatggaactctgtaaagtaatgtcgtttcggcgaaggagttggaaagtgagggcacgtgagggttcaatcgttgtgggcaaagaccccggacagcaaatccgacatcacacaacacgtagcgcctgcgcaagcagatgctttcacttgcaccggatgcacaccagcaccatgcaatcatgcaagggtcctgcagtacgtaaattcttcgacatcatggtagtgtactgggggcctcgtcagtgtctgaggattttggatagtgacaagtgaagctcaaatcccaatgcgagcggataactaaactgcgcgcgttgtgagcgttccctgctaactttgctttatccttgtgtgtattccgctagcatctttgtgaatgttcaattactttttgtggcaactactatacgtccaagcgtattgatctggtaacatcctaccgtaaatcctcataagggacggcgaattcgccgcgcgcgggcttacgacctcgtcaatcgaatgagatttcccatgagagagcaatttggtaagaaaagaaccgcagttccccaaataaatattatccaaatgtttgctgaacacggtttgcaaacactacatgtagcatccctacaagtcgagagccggtagcccactacagtacagcaatccatactctgcaactagcacaaggcaaaaacacccgtcgtactattatcgaaatcaaactccgcgtgcatgcaaaagcgcaccaagtttggcaagatctacaataatctgcccgacaagttcgaggccatttgcaagaacacgttgagcagaatactacatgcagtagaaataaaccggcaaggtcaaatatcaagaggcccaacctatggactcgatagtttaaaagcgaaaaatttggagccaccttagcgattccaagaggttttggcattatatcaatacccctggggaacataattgagtttcacaaataattttgattcactagtgcaaatgaatgaatgcttcgattaccgatttaatgtccttctcgatttggacagatactatgtactggtactagtcgtactagataatgaaaataaaactaatccaccactatgcgaaacaccacgccggtgcggtatgtgagaccaagttgtacatgccgtgtgcgaaagttggttgcgttcctttggatgaacgcgcctaagtgcttggattgccgtaattgccgcagagcacgctcgtattctttacgaatgtcggggctgaaaatccggagtagtctgcgctagtggtagcaaaatgctgaatgaatgcttgaaattgccgtgggcattgggtccggttctccgtcttcgaagcagatgtagttccgttctgtccactggtggtgaagtgtagcgcaacgattcactagtgcaaagaacatgacgaaagtggaaaaacagctatttaacgtttagtgacctggtttgccagcgttatcaaccctaagcaaagcaaagcctcactgatcaatgttcagtatgatctgtttaaacaaaacaaaacacagggaaaatacgtgtacaaccgcgggacaagttctgctgcaccatgaagagcccctttataatatttatttatttttctttatttatttattttttgccgcaaggattcacttgacttaaaataacgagaatttattgtatttatggtgtgaaaatacttcgtatattaggccgtgttcgagttgaaatagcgtatttcgagctatttcgctaaaaccagccatttcgaacaatctgccttttttacagctctgagcgaaatagctgcttcgtggaaaacagctttaccatgaatttcaaaaggagtgatttcgaggtacttgaggttttactaaaacggaggtttacaacctcaaaaagctcaaagcagctattttgtgcactaaatgcgcacgaaacagctatttgggtgccatctcgaacacggccttataaacttcgaagtattgtgctttgcaaacgttttgtcgttttgacttggagctctcctcgatttataataactcgaggtcgatttaataaaacgaggtcaaagaaagggacagatcgatctatttaagccggccaacaactcgagctacgacaagccaaatcaggtctcgaggtcgatctcctggcaggtttgagcagaacgaggtcgatctacggcaaatcgatcccttttgcgttttcaaaagcgcaattcgagccgatctataataaatcgagatcgtccatgctacctcctctgatttgtgccctgatttgtggaccggccttcctcgatctaggccataaaacggggcgacattttatctgcaaagcacaatataatacaagttatagcttgcggggggcatgcaacgtacttagtatgtgttggttttgatcaccatcacataatattattgagtcactgacagtattaatacatgtagtttgctgctaaatcggacccctccaggaaatcgggcccgatatatcggatcttggaccacccgatttgccaaaacggatgaaagccacaataccactttgtagctaggtagctggagatggagatgacctctcatcaactctatttcttgtcttttgattggtcaaaatagtttagttcacaacgtgacaactggagaattaccccgtctccttctccagctcccagaggtggagaaggagaaagtagctggagattgaggcagttcagccgcacacacaatgaacgaagaggaagctgtactggttgctacatgctcagctgtcgcacaggttgcagtcctcctatcaggagaatccgacgatgcgccgcaaggccctaaggaacagattcgtaccatcagaggcaggtatgtccaaactggtagcagccagcacgaggtcgccactggctgacgggaacggaggcgcagctctcggagcgtcatcggcagcttggtccatgacacgcgtccggtgtctcgggcacagtgttcccggccgacgaagaacagcaaagtaaggagaaggagagcgagtcgcactgtgattggctagttttacctagatgcgctctgttgttgcgaacaagctggagatggagatgcaccaactccctgtagatatccatctccagctgcgtagcgaacacgctcttagcgaaagcaacgaaccgccggctttgcggcaactaccgaatcaatcgttctcgttagttaattcgccgagtaggaaccaagtttgaacattctatttcttttcttggagataccaacgatttctatgtttggtgcgcttaacccttgtggagtgcgttaaatttattgaggtacttcctccagttcaccctgtcagcgtcgctaatagtcttacctcccgccctcaggagctggtagacatcatgaggggtcgtgcgctgacgcagccaatcgtcaaactggcccgcacgtagtcggtcagccgcggcgaacgtgagttcatcagaacttttcattccagcattgatgatcgcactcagctcgatgtcagtgaactctttccggagagacccgatgccgtagatgtccggggttatcgtcttcttgctcgcgagttcgctgtatcggacgtacgtgggcagtacctccttacggaacaggtttgcaattggctctccatgcttaatgttcaacgccttagcgacatcgtccgtggatgcctgggcatcgagcattttcttgatacccttcgggagcttgaccttgtccatcgccaacgtctgggccaccgttcggaactgctgcgattccttcgccactgcctggagttgctggctttccttcgcgatgactgcagggacgccctgggccacggacttcggcttgagcaagttcttgagcttcttgacgaattcgaaattcgccctctcttcttcttcttctggcaacgtctcggtccgcagcaaccttttggttaccatgtggttgggtccgttcataatagcgtggtcggtcgccacattcgactccgtaaccacggaggaggcgcccacactggcggctaaagcgagtaataccacaaaaatgctgcgcatatgtggactgtagttgcgctcaggaacgaaatcggagagtgaggtcctcctggcccaaatccgagccatgggctctgccttatcgatgcagcgaacaggtgctttcactcggaccgtatgtttactatcgtggtgaaaccttcgtgaacaaggtgaagcaatccaggggcttcgcaagggagacacccccgtttattggccaatttcatttccgaagatgcaatcgcaagattccaactgggggaactgcagcccgtacaccgtaatcttcacgcgatcgacaacgcggagctggtgagattgcgccacgacaagttaacggtagccaaaagccacacacacgtacagtacatgtatacatgtacacagtactggtacgggtgaggcgattattgtctgggggtgaggcgaatattgcatcccgtacgtacagtaagacgcaggcttcacctgcatactgtgctgcttcaagtaatctccgaaccttattacagtaccaaaacacgtaatgcacagtaaccgtcgggaaaataaccaagccggtatgaaatcgcatttttaaatgcagaatccccccccaatcccgtataccggttgagtcaatcgactcccgaccttaatacctagttgtgagcttgtctatcgcggactacttgcttggctccgtcgtatccttacctgagagcaagtgcatcttctccgatgcctctgttttgcttagttgtggtcatccggcctgctgacctctttagacagaaagatcgatcaaatgacatatatccttaaggccgtttagaaccctagaaaacgttcgtaaattctgtgtctaaccttcttcggccctgcagtgcagcaattcggtggcagcataccaggttgtattgatcacagataagcacgagcagttgttcgcgctgatatgacaggtacagtaagactcgtcagaatagtttaggcacttgtttggaagtctgcaagaagctaagatgtccgtggcttagtggttcgtacctcaagaattcattcacaacatataccgatttggcatttttaaattttaagaaattgatttcataccgctttggtcattttcccgtaaccatcagtggcctacagtacgagcacaaacaatagctcggacgccatgttggtggccttccctaatgtgaatgaccaacgataaaacgaaattagagaactttagtagttggaacagctccgggtttggaacaaggaaaatccggataaaatccggataaattacggataaattattataccagcggatgctccaatactcaagaacagaagttctctaatggattaagagaacggggccacggatgctgatccgagttgtgttattctacaattgcgatccgcttgtcgcggccacgtatgctcggtgtagctctccctccgatcctgactcgtctgtgtctgactcactgtccgacactggtagatgcattgctcgtaccgctcgcgcgggtgccgacggctgcggcgtcgctgctggcttcgatcggaacttgctgcctcctgccggcttcatgtgtctagacttcgatcgctctcgcgctcgtagcacttcctccagctcttctgcgtccctcaaccgtaacaggtgtggtgttggggaacatcaagttttgtgtcacactccaaaaccgcagtggaacaacgtaccaggagccaagtactactcggcgggatgaccgtccgccgagctcagtgggctgatggacagctgaactcggctgatggtgtcagaaactcaatgcacaccggccccgacctggtgacacgtggcaggcccagtgatgaagacccagccaagttcaggaaggcactggacacgctcagccgaggtcatggggagttcaagccgccgagctcggctaaacggccccacgtaccatccagatacgataaccgggtccaattgagtccgggagtcgcccagtcgagtccaagggtcgctccgacgagttcgccgtgttatcgggacacgcagtatccggctcagccgagttcaaggggttatccggacaggttatccggcttagccgagctcaagtgtcgccgagctcggtgaagagtaggccgagttccaaaaccgcccactttcatttggtatttgtataggagcttaggaatagtggaggcaccccttcagggcgcccgacagagataacaaacaacagagcagaattttctaggtccacaacacgtgcacgcgcttccagtaagccgctgcacggaccggattatgtctgctgtcagcacccgagaggcatagcttgtagggtgttgactggtagcaccaagagattaaggtcggcccgggttgggcgcgtgtctcgccaagcgcgacggaaaagtctcgccaccgctgcgagccagtgttcccgtacgtcccgggcactgattgctgagtcgagaagcctttgctctcggcgacccgtaaaagcccgcgagggccgtcgtccgtcctttggcggagagcacgggatttctaattccggagtcaggtaactcagctggcttccgtgattgactggcttggggtacttggtctcggcgaggacgagacatcactgtcccggaagggccggaccgctggggacatctcagcgcaggccaacaagggccgactagctcggctgttgttgtgtttgtagctagggcgccacatctgacgattttgtccgtgctactacaccacaactggtgccgcgacccgggagcagggtggtttgttttcgttggtaccaagtcaaccaagtttcgagtactgagcaaggtggtcaaggggagaacgttgccgagctgggccagcccagcgacggctgggggttcgcttcacacgaagccgaactcagctggcggaaagatcgccgacatgacgatggaagcggtcccacccgttcggtttggcgacgaccgcacccaagaccgaggaagagatggaaatattggagattatcatgaagaatggaagaaagccgagttgctcagcggggcagctgagttctcgctgcatgttgggcgcatggagaaacctcgacgagcccaacaaaacctcgcagccgagctcggtgacgatgcggacgacgacagtcaagacgtcgcttcaggggaccgtccgcctctgatacaacgagcgacgagggcatcaagcgcgaaatgctcgagttgggattcggtgccgaacgtctcgtggggaaccttttcactcgactaggggcaatcgaagaaatgcgaaacccgtctgcaaatggtgcaagttgcagatgcggtctaaggctattgcaccaaagagatgatccgccgactcagtgaagacagcaggctgggtcgagtcgaagaatgatactgcgtcaactgtatggattatatgaattacatgatattgaaatagagtgagcgaagatggagctggaaagcaagaagcccattcgccgggttagcgttggagtcggcgcagccgccacagccaccaggctggtggaatccgcatctcggatcgaagtctcagccgatttgccgagctgagcgattaagcccagctggtctgacgacgaccctgtgaagaagctgagggaggtgatggcgcgtctgcacagattgcgcgagtcagccgtcgatgccgaagctgtgttgactcgtcactgggtccgtgaacacgctacccactggggcgctgagtgtgatatgcggcggtacgatcgacacccttgggtacgaccgccgggacctccgaccaagtccgtgaacgatcttcccgttgtgcgctcaagctgagttggagcgcatgtgtgctgacgcgaagccgtgctgatatggagccacgctcaagcaggaaagccgaagcgaagtcgagttcgcacgatgttccagtgaggccgtattcactccatgtttaccgagaggcgactagccgagtcggtcgatgcgcggcggtggtgaacaaaccgaagttgcagcaaagctggacttgagcaaagctcagcggaggcacgctgggcaggcgcgtcgccgagaatgtcgacgtgccagcgatctcgaacgggatccgagttgatccgtagctgagcagaagcagacacctgctttgaagatggactccgacttcaatcgatccgacgtagggctaccaccgagtttaactgaagccgagtcggtgaaatcgccgagtcacggcgtcgcaaaagtgtacccaacatccaaagctggactgaagaggaatggattccacgcgaccgctgtcgtattcacattgagccaacatgagcagagcttggtcaggggtcgagcatagccgagtcgaaacacgccttcaaagcgcggatacttccgccaagggactgagctggtcagccagccagctgtgtcgttcgctcagccgagcttgcctatcaccttgctcaactgggctaagctgaagcggaatcaatgccaggtggacatcagtcgagctagcccgggttgattcgtggcagagccacaaaacatggggatcaagtggcgcctaggcgaattgcagcagaggtttgtcttgaatccgagctgaatcgggatcaggtacaagtgcagccgaggtcagcaccaactgagttgaaccacagtcaagctaaagccgagatgcgttcaagcagagccgagttgaagcgagacagggcactctgcgtggaagtagtttgacactgagatgtcgtgaagccgagttcaaccaagccggaacggagccgagttcgagcaacgcttcgaagaagcgctggtcgttggagtggagccgattgaagagcaaccttgctgaagcaaagccacgatcaagttgagccgcctcgcgtccagttccagtgggaacgcatacatctcggtcttgcgcccggttctcgtcggattccagccgagacgacgtaggtcgagccgacgttatgcgcagccgagtccgagcagagctgagctgaagcgagaccgagatcacgctgcgtccgaatgaggtcgcgttcgcactgggttgctgcgaagccgagaacattggagtgcgatcaagctggaatgggatgccgagttccagcagtgccgcggattggatggcgccaatctgaagtgtactcacttcaacggaaggaaacactgggctgagttgcggtacgccgagtttcagtgtgatcgcgttcggaagttcgccgagttgagtgctggtaaacgctgaaccgaagataccgaattcaaactgagtttgaacgcagccgagctcgcggcgagccgagttggaatgcgaccgaatgtagtgctgttccagtcgagcttgcccaccaccttcccaaccaagctgagcccagtcggggtaagctggtctaacagagctggagacatgccgaagtcaaggtccgttgaccactgaacccagctcggtccgttcaggacaactcgactggagcatcaaacgcgcgacgaactcgccggacacggcagcgaggcggtgaagagcttcccactcaacgtgaagcgtgttcagactgagctcggctacacctcgaactcagcatgagcgctctccaatcggaacatggtgggcagagagcaagttcgcggtggatgcgttgcgggaacattgacgagaggcagacgtgcgagctgcatgaacggagggtgccaattggcggagaggacgatcgacgtgcggtcgtgtggagaagcgcgagaacaagatttgttctctgagaaaggcgtcataaccgatcgaccgaaaatcaaggagatcgacgatcgagagaagtgcgacgtgaataagactgggattgtgtagatcaagaaggttcgacgagcgatcgaggcatctggataatgctcgcgcgtaggcggagtgtggtacgaggtagatcacagctgatcgacacatggagaatggtggtacctcgttcgaagagcgcgtctcgaaggcgaagagcgtcacgcgcgatatcgtagatttgggacggcggaagaccgaagtggacagatcgccgatccagcacggcggatcgtggatcgctgattgagggtcgatcgcgatcgccgattgccgatcgaccaagatgagaaaatatgaaaaatggcgtcccatccctaaataacgcactacatctggatatagcacacgtacactgtaacggggttacacgagagttacccgaagggttacgaagtgggtacacactgtttagcctaaatcagtaagagaatcagtacatggcttcagagccactgattatgtatatgactaggcttcactatgctagatagtgaaccggatacatttacaccgtaggcggcttggtcgcgctaaagagaaataaattcagtttgagattcacacagttaagattgtccggtgtaacccttgaccacacgagttttccccacctcacccgggttgagtgggaagctcttcaccgcctcgctgccgtgtccggcgagttcgtcgtcacgtcgctgctgagctcagcgaccaccgaccaacaacgccaggctgcccaagagttcatggaacgcgagctcgccgatgccaagcggcgagtgtcaactccctcgcattcaggaacgatgcggtgaagatggagacgtcgacgtattccggcgccggccaagaccgactgcccctgaaccgctggttcagggagatcgacgtcgccatcgcctcgagactgatcgaggcgccgacggcgaaagtgaacttcctcctgttgcgtttgtcggggaaggcgaaggagtgggcccttggcaagcttgttgtagaccaacacgccttcccgagtctggacagtctccagaaagaccttcgacttgcgttcgagcctccgcaagacgaatcgcggatgcgtgctgcgttcttcgcgttgaagcatggcaagctgtccatgcgcgactacgtacagaagactcgtcacctggcctcgtgcatcgtcacgagccccatcgacatggcttcgcaggtccacgtcttcgtgtttggcatgcgagaaggaatgacgcgctactgtctcacgcgtgccgagccgaagtcgctggaagaagcgttcgtcctcgcattgcgcgaggactacacggtatccgcttcgtactcgcgacagttgccgtcggacactcgggcagcgatgcccgagccaatggaaatcgatgccgtcgaagccgcgaagaataaccggcggtactactcgcgcggcggccgcaattctcgttcgctgacctgccaccgttgtgggaagttgggtcatcgcgcggcaatctgccacgcgcctgcgccgatgcacgctgcagtcgctcgcgccgacgatgagctcctggccgttcaacaaaaaacgaccgggaccagtaagtgcggggcgccctactggctggaacggaggtccgggtcccccggtggcaacccgatctcctagcccccactgcttcacgcacacttcaatgccaccaccaccagcggcgaccacagactgatcatcgtcagcctgcacgtcgccggcgcgcggcgtcctctccgtgcgctcctggattcgggcgcaacgaacaacttcttccacgcctcgtgtttgtcgcttctttcctcggacatatccgtctgcgagggtcccggcgtcgtcttcattaagctcgctgacggcatgccacaccgtgtcccacggcatgatatcacgcgccgtacacgttcgacggcttccgtagcaacgacgacttcctggtgatcgagatgaactacgcgttcgactgcatcttggacataccgtggctgacacggtatcagccgaagatcgactggctggcccgatcggtcaagcgtcgagccgactacgatgtgagtgaagtgttcactcatctcctggtcgctccgacggactggccccacgttaccgtcgtggatcgttcatccacgacgcaagccctacacagagcgagcgatggccctctctgtatggcatgtgcggtgctgttggatgaaccgacaaatgaacccaaaacctcgcagcgaagcgaggttgttgcgagggcggtcgagcgaaggcgactcccgcgaaccaacgaggcggtcgagcgacgtgggctcccgcgccccaacgaggcggtcgagcgacgtgggctcccgcgaatcaacaaggcggtcgagcaagcggtgctcccgcgtacttccggtgcggacgggctcgacactccgcacctagaggagggtgaagtatcgtccagcgatagcgacaatgtgtcgtccagtgccagcgagtcgtccacctcgagctcctgctcgaggtcttcgaggaggaagaggaggaaatccaagcgacagcgtctcaggccacggaacaacactaaaaccgcacctcccccgacggaatctgtctgcgctgtcgaatacgtggacggagcacgcgggtcatcgaagtcgcgagtccacctcgcgacgctcgcggaatcactcggctccccgggctctcgtggaaacacttccttcgcgatccgaaggctggtgacatcgagcaggtgtgtttgatcaccgagaccaacgggacagccgagggtcttcacgcactcagcggtgacgacgcgtcgtcgcggccgaggagtgccgaaccgaagtctgcccgcgaagagcgattcgcagcgcagtcctgggaagcgctgaagaagtcgggtaacccagtctacgataccgcgcgcgagtttgaagacgtcttccctgatgagatccccgccgagcttccagccgaccgcggagttcggcacgagatcgacctcgcgcccggaacgaagtactgcgtgacgcggcagtagccactaccgcgagaccaggtcaaggccatcgacgagttcttcgaaaagcgccgcctggctggccacgtccgcgatagcacctccccacactctagccccacgttctgtgtgaagaaggcgactggcggctggcgcatcgtccacgtgttcaataagctgcgaccatcccgacacagaccccgatcccgcggaaggacatggtactcgactccatgccaggtagcgtcatctatagcgccatcgacctgacggacggcttctatgaagctatgtgacgagctcaacggtctacagagttgtcgtcctctccgaggaactgtttcgtaaagcacactagtgttagaaaaaaactaagtttcataataggctggcgagcaaacgccgcgccgataatagtgactgaagacactacgctcattcggtgagcaaacgctgcacctccccatgagcgaacgctgcacagaaaaatcggctatgctacagttaccgatcagtcgcttgtctaacgcaaagtagattgcagtgtggggttccgtggtccatcgctgttttggcctcggggccaaagttgttcctgccttctagccgcactcccggcagaggccggagaagcccccatcgttggcgggcctcaaggcgactcttcctacccggccgcagatctcaactatgggaaggctagacacgttttaggccaatcatagtctgtaggtcaaatatatgcattatagtatggagccaaagtgcgtgtgggctcgcttcctttttgtgtagaaacatatgcgtccaggatgagagacgagtgccgcgagggcggcgaggacggcaagggcgacaagtttagaacgtcaactacataaagattatttttaggttgccttctgcaatgtcatagcgcctagcaacctcagtggacatttatatacgtattttgcaggtctcgcatgggaaatgatctcgggtggtcaattccgtatgcaatgcagaagaatgttgccgcacggagtctcgatgacgggcagcgcaatggacgcgttgcgtcgtgaattcatgcgccaaggtgttcaaggacaacacatccgccgacacatcatagaatttgtgctggggccgccacgccttattagaaggcccgatgtggtgaatgcttttgtcgagcttcaacaggaaccccagcctcccccgaatccgccacaccaagtgcaacaaacaccaatggaagagggccccgaacatcaacatcaaaacaacctagaactcctactcccagctcacgctactgcctatgatcctcgtgcaccagaacctaatccagcccgcgctaccgctcttgatcctcgtggaccagggccggccgtacagcagggacagccaagccgcagggcgatccgaacacggtcaacctgtgcagcgcccggaccaagttgctgaaagacgtctagcggatttcctacatcaactagaacccgtcgtgattccagacgacgcgcccgaaatttccgcggcaagaaatgccgccgatgagcccgacgatcagcgttacccttatatccgggtagtacaatggatctatgacggtatcgaaatgagtgctgaggtccagtggcacaacactatcgaacctgcaagaaatcttacccccgaagatcaagcggaggcccagcgccaactacgtgtacaccaagaccgagcaggggcccagcgccgtaatatcattgaacccgtagaagatctcacccctgaagatcgagcggaggtccagcgcgaagagcgcaatcagcgtgcacgagagcggctctgggctcatcgggtaagccaagtacgtgcatttagccgaggtatttcataactttgttttgtattgcaggatgacagcgaagatgagaacgaacgctcaagcgaagaagacgacgaatggcttccaggtgattgacggctcagtacctctgcaacggtttgtattacctacttcaagtacttttttctgcattcgtgacgcaacttcgtgcactttccacataattaaacccttaaccatgcacggcaacacggtgacgcagctcgcccaccagctgccaatacaccacgtcactcacttccatgcccaccgcagccgaaacatacaccgagccatacacggagctcgagacggagaacgtgaccgagacgcccatcgatgcctagccatacaccaactccgagacgaagcccgagaccgagcaagacgagtcgaggcagcagctgccgccacctcccaccactctgacattcgccggaacgcagcgtggccacggccatttcaccccggagctatacgacggcccgaacggcctgccctgcaacgtgtacatcgctgtcgccgccacgcacttgtccgaggtgacagagctcgccgaaccgctccaccacaccacatcgctgacccccatggtcaccacagccgaaacatacaccgagccatacacggagctcgagacggagaacgtgaccgagacgcccatcgatgcctagccatacaccaactccgagacgaagcccgagaccgagcaagacgagtcgaggcagcagctgccgccacctcccaccactctgacattcgccggaacgcagcgtggccacggccatttcaccccggagctatacgacggcccgaacggcctgccctgcaacgtgtacatcgccgtcgccgccatgcacttgtccgaggtgacagagctcgccgaagcgctccaccacaccacatcgctgacccccatgatcaccacagccgaaacatacaccgagccatacacggagcccgagacggagaacgtgaccgagacgcccatcgatgcctagccatacaccaacttccccatccattcgctataattgactacgtaacgtgattgtattggttggtgttagaggttttaagggccccgtaactttcaaatgatactgaaagagttaatgcgataggaagtacttttaccaaacatagatgttttctttagttctccatctatgatctcgtattctaattccgcctttgttagtttgtcaaatgctccgccatgcatctcaccaggatgtaatacaacccggtcgccttttgtcgttctttctcacgagcttgttcgtatgctccccattgctggtgactcatctgaacggcttcaatctggataatattctttcttaatggtagctgcaagcgtcggatagaatcccaatgcttggcgctcgaataaatcacccttgtatgataccagtcctgtcattcgcgcgcgaagtttatctatgttcttcagcttcatatgttttgtgtcaatgaagtaccgttcaaaatctcctgatgactctggcaacagcgttgtccattctccatcttctgtcttgattggtcccttacagatattacgcgctggaatcatttcctaaagattattaatgataccagatgcagttagcatcatgattttgcagttcttggcagccatcaacatatcatacaatgctgtagcattcttagatccatttgtcattgcaacaagggcattgtgtgcttcgtccatgataataaactcattgtctagtcgtaatgatttgatctctataccagttagctcatcctggtggtctctagtttgtcaaccatattagatgcattagaagaaacaaatcggcatcgattactttttgccccaaaccgcttgagctccttacggaagttatcgtgcagcgattttggtgcaataactatacattctctaaaatgtttaaagcgttctgcgatggcgattgcattgattgtttttcctgaacctgtaccatgcagtagtagcatcccacgattttgcgagtggattgcatattctaatgcggcctgttgatgcggctgaagttgaattgacatagctgtgttgcggtactatattatcgcttgtgaaattgcacttcagatatcttagatatataccaataccactaacacgatgaacactaactacaaattccaatatcgtaattatttgaaggttcgcgactgggcaaccagctatattaccatcattgatcatatgatatggtcagagtataacgcatacgaacagcatgctctcatcgatgagatcaaaagtaatcgtgtgttcatctatcaaactgagctagaatgtttaggcgaagacccgactgcaatcaaggtagcacgcgaattcctagaagcgtttgaaatattctaatcgagcgccgccgctacgcggcggtgatttttagtttgttggcgcttcgctcgctatgctcgcttcgctattggagcagactgcctacgcttcgctacggcagtggcggacccgttccgctcgcctcgtcggctcgctccggggcgggtactgcggcccagcaatatcgtatgagggggtcgcagtccgatttgctgcgctcggcagcaaatcggacttagtgggaatcgtacttagtgaataagcgtgatctacgcgcgtctttctgattgattcttaggatacaaaataagttcatactagcaaccctaataattggaacagtccaacgattgcctgtttactcaagcagctgacaacggaagaagaatggaacaagatatgtaactttccggctgcggcatacgtgtggttcaaccatgacgataaatatcttttgaatggactaaaacataatcctaacgtgttgacatatgactacgatcgcattgtagatgctcgcaaaaatttacaccgcgagttattgacaaagctatagtagcttacttttttttgctaaatatagcatgatagtttacgttcttgagttagctgatggtcattattatgttgggcgtatcgataatttaacggcgcgactagaagcgcatgcaaatgggcgtggctctgaatggactaaacaatacccgacgatccaactaaaaggaacgtatgaggaaacttccccgttctacgaagatatgatcacaaaaataatgatggccaaatacaggatcagcaaagttcgtggtggtagctactcacaagtgtttcttccaaagtcaaagcattttgcaattgtatctgagttacgcggagctaaaggaacgtgcttccgctgtggtgggtcacactttgttcgcagttgcaaggaacctagaacagatgtaggcgatccgccagaagaaatggtagaagaatcagggcttgcgtatcgtttgttgcaagtgcacatcgtaaagcaaccagagcaataaattggttctggagctgaaacatttatctgacagcaatcatgatgtttcgtatgcccttcgttgtaaacggattggtgttacgataggtattgtggctttcatcctttttggcaatttgggggctccgagataggaaatagagggtccgagataatatagatctcagatatagcaggaagggcgatctgaaatgaggagaagggtgggtcaaaaataataaatgtggtccgctttaatcatactgggtccgttttgccaacattcgccggcaaaaatggatggcgcgccgcaagtaaggacctcgactcgctcaacacttgccaatccgacgcctagctgcgaaacgcagccatgacctacgccgacgactttcgctggagggcgattgtctaagtgcatgtctacggtgttcctattgagcatgtatcagagcttctcgggcccaaggatagaacctttcgtcatcgcctggatcgtcacggccgtccttcggctctgcaaggacattgcggtcgtcccgtgagtcttcggtggcagacgtctccgtctcagtgtcgtcgagtgcatcttcgaattcttcggctaccgtcaccgttggctccggcgcatcatatgagcttgcaacgcccctcactgctaagagctccgtcgtgccggtgtaccgcaactgggtgggacctcgctccgtccaaggcgacagcgcatgctggcgcgaggcgcacgttatgaagaaatgcccctcgaactacgaccgcaacgagaagaccaacacgtgctgggccgaatgccccattgagtacccggtggagtgcggcatggagtgcatccgccagaacgacgactgcggacgcgaggtgctctacaaggtcggctccgtgttcaacgtcggcatcaacggcgtcatggacaactggttcggcaagttctcggaaatggccaagggcgtgcggtccgccgtcatgtgctcctgcatgattgtgggtgagctccgggcacttaaccgctacatccgctccattaaagctgcggacctcgaggcgtctcaagacaagatcatggtgctgctctatcagtcgaacgctgtggtggttgaactgcctattacgatcaagctgtgtatgggcggaaaaacaacccgccaatggtggctggcggaccgcatcatggccacttcgcagttcattctgtcccaggttctggcccacgacgacagcctcattacgagttgggagcgcttcaaggccttcatgaagggagccaacttcacggccccgccggagcagatcaccaagggcgagatcggatacctcaaggacgctctcaggcccaactcgacgtgcggccacgacctgcaaggcctcatggagcgcacgtggtcgaccgtcgaggccttgagggagcaaaaccccggcattaccaaggacgagctgcgcgtcaagatccaggacacggacatcgtcaagacggacatcgccacggtgaccagcaactgcatggagctactgatctcccagtccgacgagaagacggcctataccacgcgcgacaagctgcgcaagaccttcggtgtcgtcatcaacgacctcatcacaacgggcaagatcgacaacggcacgtcctacaaggccatggagtacgtgtacaaggtggtgaaccagggcctcaacttctgggtcgtcacgggcttcgacatgagcggcatctcgagtttcatctccgagtacttccagtccatctgcggcccgacgcagttcatgggcgagatcgacgacggcagggctcaacatgatccagaaggcgttcaagaacagcaccatgtcctggaccaagaagggcgacggccaggtgatcatcaacttccagagcaccgacaccaagaacgtgacggtcaacattatgtctggaggcgacaagatcgacgaaatcgacgtcgctgcctgtgggaaagccacgtggaagtcaactgtggagaagctgggcggccggacgctgtatctggatcgctggcgtcctggtttcctgggtcttcctggcaccggaggtggctctttgatgctgtgggtccctcatgcagctgaaggcattgtctgttgagtcggccattgaccatgtttcaaaggtaaaaactgtctcgatcatctcgtgagtcacacaacactacatcggtataacgcgcacgtgttgactcaacacatgttacggtaggccataacgaaatcatcgatgacttgagcacgtctgattcagacgtgcccaagtcatcgatcatttcgagacggtctgaagcggtacaacgaagaaagaagggaatgtcaaatgaaggttcaaggaaagcttgacgtcgcacttctcggaaaccagagcttcgtagaggtacccttgaagttgtccacaacaactttagtgccactgatatcagctcgaagcttttccgggttcgaagacgatgcctatcaatttaggttgaagagaactactgtaaactgcacttggtcgactcactggtagcgactgctcctacctgttgtcggaacgtgcgccgactgcaacaggatggctgcttctgccccatcgctccattgaagcccaccggtttttccgacttgttcacgatgctcaataccagggacttcctggagggcggcgtgtatgtgtctaactcttagagcgtgttcgctacgcagctggagatggatatctgcagggagttggtgcagggagttggtgcagggagttggtgcatctccatctccagcttgttcgctacaacagagcgcatctaggtaaaattagccaattacagtgcaactgcaacgactcgctttactttgctgtttcttcgtcggccgagaacactgtgcccgagacaccggacgcgtggcaagatggaccaagctgccccgagagctgcgcctccgttcccgtcagccagtggcgacctcgtgctgactgctgccagtttggacatacctgcctctgatgttgctcttgcctagactgtgtatgcgacaccggccactactcaaacggaatcagaagaaaaagaccaatactggtgaagcgtctatcgctacgaagcaaccctcctttgcgtggacgactgcagcagctgatgccttgctgcgggctcgttttgacacgctcaagcatcgttttcagggcaccagaagcgcgaaacagcttgccgccgcctggatgttagtctccgcagaaacgtatctagtctcggggctcgaagtgaaaccccaccagtgcaagtcaaaggtaaagtacaaggccatctatgataacgtgtaggatttctaattgattttgtaaaaagtaaagcgcggctgcaactttcttctcaaagctatgctgccgtactttggcagcagcaaacagaacaccttgatctcgtagtaaaccagcaatccgtaggaaagtcggcttggtgcagcgaagattccaaaccaacttgcatacgcggctgactgtagcatgaggtcacggtacgaatctgttccttagggcctcgcggcgcatcgtcggattctcctgataggaggactgcaacctgtgcgacagctgagcatgtagcaaccagtacagcttcctcttcgtccattgtgtgtgcggctgaactgcctcaatctccagctactttctccttctccacctctgggagctggagaaggagacggggtaattctccagttgtcacgttgtgaactaaactattttgaccaatcaaaagacaagaaatagagttgatgagaggccatctccatctccatctccagctccagctacctagcgattcgctagtagcgaacacgctcttagagcgtgcagaagaaggcggaaggacacggcaagcagctctcgatgatgatcacccacgagtaaaggacgataacaacctcagatttgtacaacagcaaccacaccaaacgggcacgagcaaccatagcacgatcgacgattgggaaatggacagttcggtaactacatgcagagcgactcgctctgggaaatggactggtcaaaagctagagcgactcgctctgagcgagacaacaatattattgagagcatgcgcgcaggtacatgtaacacctgcgcaagaaatgtaattaggatgccatggtacttatatttataggattttactcttcttatttgctacgttggtcgcgcggataatacgctgatgtagaagcgcacggtagtttacgacattgaatttgtcggagcacaacttatccattgatccacgtagcgtatgcgggcgatctttcataatcgctgtggatatcttttcgatgaagtagagcagataaattccacaatcaacagagttttgctgctgaggcttggtagggcaggcgtgaaaactccatttaaccgaccccaccgaagctgtttctgggacccgctctttcgccaaccaccactgcatcaaggaaaacacgtttgccgtgtcatgcgcttctgtagcagaattaacgtgatacagccgaatgacgccccccctgcaggggattctcaaccgcaagaatgctccagtgactattaccgttaactggaagaataacaaaccggtacgatacccagtcaaatttccctatgtgaccagcgaggcgctcgtcccttgcagctttcgccttcgttcttttcacggcttgcatcgttcggaaaaaagaagttccgcggcaaaaaattaagccattctcccgaggcatgaaaccatgcacaaaataatcaacggcggactctgtcaaagtctgatgcggcataggctgtccaggtcctcgcgatagatccagctcgtatcatcaccacgcgtccactccaatattggcttctgcttccgcgacctggtagcagactgcctccgaggcaaagaagtcttcttagcagctgtaggcacctcatactcgctctcttcggactcgttacaatccatactctcgctactgctatcgctttcatccgatccagcgctatcgtagctgtcttcatcgctgtcttcatctccacagccatcgaagggtacagcgacgtcaccgagggttacaccattatcttgctcgagctcactgtcctcaccaggggttacgccgccatcacgaggggttactctatcatcagtagcggtcactctatcattttgaccgcgctcactgtcgacaccaggggttacgccgccatcacgaggggttacaccatcatcactagtggttattccatcattttgaacacgctcactgtcgacaccaggggttacgcgtccagcacctccattctcctcgtgttcactgtcatcgccacgggttacaccgccaccaccagaggttgcaccgccatctttctcgtcctcactaccatcgccagagtgtacaacaccgtcaccaggggttacgccgccagcacctccattctcctcgtgctcactgtcatcgccacgggttacaccgccaccaccagaggttgcaccgccgtcagtagagggtacaccgccatcgtcagggggtacacgtgctgtgtagcgttggataaaccgttttacccatgttacttgggactctggaatatcaaaatccgagttgaactcttccaggctccggcaataaaacatcacatcgtcaaacgtccagttgtcctccataagctcatcaaggtattcgattactctccattcgtccggcttcatcttgtgttttcgtcctccgccttcgttgcgcttgcgatctgagccaacctctttgtcacaaacatcccagtagcgtttcacccagcctctcaaagtcgattccttgacctaatgctcgacagcggcttcttctagagtccaatctgggttatctactttccagcgccttagaagcgcaagcttctccttctcagtgcgattcacacacacccgcctcttctttcggaaaaggggggaagggagggggaattctcgaatgatagtcagccgtatatggccaagcattttaggtatcagatttaatcagatcaagagtaaatatcaatttaacttgcgcgagttattctgaatccagtatttcagatttactcgcgtgagttattctgaatccagcactttgaggttagtatgaagtacttcggggttagtatgaagtagtgcgtaaccgacctacagcagaccaggggggctgtatgaggttcgaactgcagtgcttacattccctaagcccgcatttgtggtgatacgcttatacttgagcagtggtcgtgagcttatccggttaacacgaacgcctactcagccaagttgcctttccgtccattgtagctagtagggggttgcttgtacaggatgacagcagcgaggcccaagacttattgacgcctgaacaggacaagcgcgaagcgacaagtgccgagcacgaactaagtcaagggatgatccaaactacacatgtgggctttatataactcaatggaaacctccattttgatatatggagagtagcacatagtgaccatgttgcgttggcggcaccaagtgctaatagttagcaggtgcttccaagccgatgaattctacttattaacacggaaaacgctgttgagaaatcaagatagattccgggagagctcgaaagtggtttcgttacgcgagcctgattgttctacccacaaaactagaaacacctacagagtggcattcgaatacatactatgtgagtgatcaattatatcgctttgtgacgtaggtgtttgtagatcttgcgatataagcaaggtccaggaaacaactacatggtatcggtggcaacaaccagcctccatttcaacattaccgaccttgtgagaagtacttcagtcgtaaaagatgtaatattcctatagacacgcaggtagcctcttgccaggaactaatctaaacaaaaattgcatgtcgagggccgccgtggccaggggggacggccaatttggcgtctgatggggacgggctcggttggaagtggcaaatgctcagatgtggttgacgtagaccatacatatggcccagaactggtaaatgtttcttgccaagtcgccaaaccagtctgaaatgaatatgggggagctgcaggacttggccgtgcaatcggcgggtagagaggctggaaatgctgtggatcgagctggaaagccaccgggtctggtaaagtcgccgtgtaaccagttggtctgtaggcatatgctgtgtatctggtgtgatcttgcggacaaaggttgaaaccaggcgcgaagccaatattgaacccgacttctgccccgaccacaccaagactttgagctgggaagttatgcgcatgtctcctgagatcggacccggtgtgattgccatgcagcgacacttcgttggctgccagcagtaaaccggtagctgaatcatctacatgcactgtagccgcactgctcacttgtggacgcttctggcgcacacgcctatccttgaatcttaaattggacccattaactcctggaacgctgagtccgtaagccgcaagtccacagattatgtgggcacaagacaggaacttcttatagaaaatacatgagcactcaaacgtactcaggtgcaccgcccacccgcctcgtggcatgccaacgtggtgcgcgcggcgtacagaccatttcacagcttcctgatagaacttggcagcggtagccttttctgcacctgttaaacactcgggcgatatgatgacaggagttttgacgttgctgggggcctccaactcgtcaagatcagacagttcggagcggtcttccaaatgaccaccgcaatgatatagcacgcgaacaaccgacttctcggtcgtagcgtaaacgacgactcggttggtcgacactaacgttcgggccagctgctttgcaacttgaggcggggcgtttggtccagatgccatgggaggtggtacacacagcgaataatcttctgcaatcgtcagtagcttcatcaacaaacggcgcgtatctgctgccttgcgctgcgtatagcgcttgatgctggcattaaacacttcacatgggttgttggttgtagcgtacccccctggagagtgataaatctgccatctccagaagcggctatgaatccattgtgccgcgaaatatgtcaaaaagacgtgcaaccttctatcgcattgccactcttgagatacacgcccccacacctcccaaaattcggtttggttgagtgtgtagtgcatgtcaagaataccacgatacaccatagctcgcaccgaatctggtaagtgtcgcattcgcttgcgtacattgtacatcacgtggaagaaacacatcaggtacggacaggttgcacattctgcaacatcccgcagtccgttcaattgggcctcttcggcgtcgcccattatcacgtcaactcgaagtggtcttttcatgtgggtcctgaaaattcgtgcgaaagctccaatcgattcgtaatattcgcgtcgggtcctttggctaacaatgaaaagcgcggctaggtggtagcttcggtggcgatcggtgaaaccgcacgtaacaacagggtaaccgatgtcgctcagcttgaaagtagcgtccaagtgaaaaatgagaaatgcttcgcgatcctgtagcgaactgatgttttgcattagcttcaagctggtgattccaagtatcaacggttcatcatcttccccgttcccaacaaaagggaagccgtgttcatcttcacgatttccaaacacaaacgcggtgtcgggatccactccagcaacgaaggccttcgccttcactaactccttcgtcctgacaatagagtttttagacccctgcagccatcgattgtacttgacactacgcagaacttgtgggcacgtcggaaacccaagcactggagtcggtatttcaggtgcacgaagcatgttgctccagattaagcgtggtggtaccgcgttttcacccattcgctggatgtagtcgcgcatttcacgtgtcaccttggcgcgaggaggtaacgaacacgctatgtcttcacgcgcgtgtggctggccatttgtgtacgcaatccaccgcttcgaagtcgggcactcatgcactttccagagcgttgcacatttaacagttcctttgcagtctggactctgacagcgaaggcgccgctcagccatcgagtggtccccggggcaaatcatacaccagcgcgtccttacccaaaatatggcagaacagcaaaatcgctcccagcgaaacttgactaacgcatcttcgccttggaactcggctaacttcgttcaggtgtggtttggagacatctgaggtggggacagctgcagctaggttctccgcaatctctcgaaaggtactggcttgttgtgttgtgtggggagctgttggccgacagtaatctcgtgtagattacaccaaggttgtgaaatttgaatatttgaaagtctgagcgtcagattaactcgcgcgagttattgtgaatcaagaaattcagattaactcgcgcgagttattgtgaatcaaggggtttaagctgagccacctacacgttagcactggtcatcgccgcgatcaacgttttgtatggttgccgcactttggaatactgtagaaataccagccagttcagcaaccagctttgcaaccgtcatctcattggttaaaaatggagtaccaggtaatgtgtcactttgctgtagccctttgaggttgctttatgagcaacgcgctgtgaaatgagctgaataactcttgtgcatgtagtactgactgcgagaacctctttgtaaaacactagcgtcgctctcgtaggtgcagtaccgaccgcgagaacaggtcacggccttgtactccttgaacgccttaactttcttcaacagagcggcaacagctcacgcgtgcaggcagtactgctgcggggtccttccataccgattttatgagtctgtagccgcgggacggcttccatttcacgcagattgctactgtgcggtaggtctggcgggctggcttttatttgtgtgaagatgtctgaaatgatgacacagtttacctgcgttctctcatctcagtgagagctggatagagtgtgcctctgatcctacctagtagccgtagatgaggaagtggtagaggtagcctgcatgaaatcgtacgggttgtgcagcagcaccaggagggcgcggagctagctctaccggtagccccgccgccataacaggccttcggctccgacgtgacctcctactacgtgcaggtacgacagtatgagctggttcgaccagccatggaaagctccaggccgccgtaggcggtgccacggcttgccacggtgataaacgctttgcaaccctgcataaacgaattcacttgtgttttgtatactgtctcccatacggcgtcgttttgctaccgtgacttacagtttgtataggagttgagttgcaaaacagactaatacttgctaccgtgacttgcagtttgtataggagttgagactaatacttgctaccgtgtgcgcaaccgaagttgcaagcgataccgtaccatttggctacagtacaagcagcaatcctggtcgataccatgcagctggccaatcagaggtggcgatttctagaaatacaacctgggttgcaaatggccggtaatgtaccggtattaacagctctggcaatgaggcagagcaacagatcaagcttgggaactgacaatctggctaccggtaccggtacgatgcttgagaaagtacagttagaaagtgcaggttgctagtgaccggaaaagtggttgttgacgatcactttccagctgttgtggttgttctcgtcttttttagattgccgttgtcccaaagaaggttgtttgtggtccaaagttggtacactggcgacccggactcatcacccacgaggaggacaggcacgtgtacacgtttaatacatgtacaggcgtcctcgggctagtcccggctgtacaaccgcatattttaatgtacctcgcacaggaagtacaacaagctctcaagatttgcgcgctacttctgcaaacgtattgatattgatgagtgtacagcgatacctactgcgacaagtggcacggtgcgggaatacctccaccgtaacttcgttccagctgtgaggctttgccatatttagcgtctaaaatggtcggcaaaataactgcaaagcacaataacatcttcaaggaaaacatacagcaccgcaatcgctgaagtcgttattgctcgtgatcatgagctttgaaagaggctggatggacgcgcgcggtggctgcaaaccataatctagcagatcgaaggtcttcgacactctccaatttaccagcaaccagcaacacaaggaagaaacctggcctctgccatgctgctctaccctgccatcgccttggcgttggctctcggacaagtgtctgcggcaactaacctaacctggacaccttgccccctcacaagtgacaaatccagtgacggtagtcccaaggataatgtggcggaatgcaccacgtacgctgcgccgctgtgccaccccgggatctgcgaaacgcccgactcggccatctcgacagttgatgtattcgtgaggcgaattcccgctaaccgacaacccgatgtagctccaaacgtgtggcttgttcagggtggcccgtcctactcggactctctgcgtaagtactgcaagaccgttggagcacgtgatgatttcaaggactaacgtttgctgtgggcggttgtgttccagtggacattccgataatgatactgtatcaccaactgaagggcgaggcgaacgtgtacacgatggaccaccgcggggctggacagagtacgcccttgaagtgtgcggcccaagccaagtcgtcaagcgcggtcaatctggatctggaactggtctctgcatgtgcaaaggaactcgaggagaagtacggggacctcgcggccttctcgaccaccagcgctgccatggacctgacgactttcatctcgaagtatggcaacgatttcagtacgaccttgtacggagtgagctacggtacgatctgggtggagcgcgtgatgcatctcaatcctccggaggtgacggggtacgttctggacagggtcaccacgacctcggggtcgtcgctggataacatctacagcatgtcgggtttagatggcgcgtacgatgaggttgccgactcgttcatggctttgtgctcagaagacagctcgtgcaacgtgcgcttcaagaagaaaggacttaaggccacgctgcaacaattgataatgaaactcgacaagaatccgaaagcgacgtgtgccaagttgctgaaaactgcgcaaaccggccaggacgaggacccgccatcgtttgtgcttcgctatctgctaggcgcacttttagacacggacatgcgaacgctcatcccgccaatcgtataccgattgttccgttgcgcgaagaaggacgttgccgttttgaccaagttcattgagaccgttaacccgagcttcaaccccaccgccaaggatatgggctccggatccgtcctgctggattcgatcgtgggcttctcggagatgtgggaagcgccttcaccctccggtcaggagctcaggacacgcttcgaaggtacgattatgaacggctggccggcgtacacgatgctacccgaatactgcgcattctctaaggaaaaatcaccaacgtgcaacaagctcaaggtcggcaactacaaagggaacggcatcatttacgagcgcgacgagtactggaacaaggccgccaaaatccccgagaaagccaacgtgttgcttatgaacgatggactcgatgcgagggcgtctccgaagtatgcacaggccttgttgaaggctcttgacggccagaagaaggagctcgtcactttcaagtacacgtccggtagcagtctcatcgacagcaattacgagccagcttgtggtatgtacgtcctttcctctttcgtgcagcacgatggcgacttgaccaagctgaacaagacgtgccttgaggacgaggcggcatttagctggacgataccgaaagtttaccaatactcgatcttgagcactaaggacgcgtacgacggtgagttcgacccgaacttgagtgccgatgaggcgtctagcgatgccggcgactcatctggctccatggaagaagactcgcctggtcaggcttaagcctcaattgattcagccagcaacagttaaagcatctcttcatccgaagtcgaggacatgagcgcagcggtcgaaaaagtcacgggtggtggaacggggcctgcgctggaaaggtttgggcagcaagtcggtaggcggagtgcgtttcttggaagatggcagtaaatgagtcggtggcggattgttcagcataaaactgtcgggcattcggtaggcttcgcgatcactcattgacatgtgaatacacaagcccgtagatttgtattccgttgcgtgtcgacaacgaacgctttcaccaactttgtcgtggagagctcccatcttctctgcttactcgtgacccacaaaagaagatccgaggttagttcgaagcactgcgtaatatatgtagcactgtactacttcgtattgtgctttgcacgaactttggcatgcgattaagggctctacaccaacgagcaaatccttcccggtgttcatatctcgcagcctaactctaagttaaagttaagctaatcaaccgccagtaccaagcacaacgcagagcaagaacggagcggttgccactgcaagaataaatcggttgtcgctgcaagaaaacaaactgataaggtcccgatagaatggcgccaactccttgcataatagtaagcaccgatttcggcggggacgttttcttcttcgctctcttcgtcgtggccttgcgcgttaaaccaagctcgaatttcagagcacggcatatagtagctgtagaaaatttctactaaaaatgtttggatgtgcaggaaacgctgactttaaagctgcttgcagctcctcgatataaaaacagggatgttcttcaatattgtagatgtagttcagtacgatagatcgccaacgcatgtcaatcatcgactacacctttgccaatccaagttggtagtagtgtaaggcaaagccgagagtcacgtaaatacgaaaaatatttttttcaaaaatttattttcgaggattagtacagaccaatgcggatttagtccacagcaaacatctaagttccatactcgatgggctcgctacgaatagcagcggcgacagacagcgcacattgtcgcgccatcttgttaacgaggcgcatgtcaatgcaaggcatgcagtgctccgcggctttctcgagcagtcgcatcctacgctccgtcttctggccgtgcggcacgttgatcatctcatcgtggctcaagcccagatacaccttgatgcgagcttttaaaacgctaaagcaacctgcacaataatacattgtatcgcctcagtacctctaagtatatcgcaccaaaagataagctacccgtaccttcgatcgggttacacataggcgagtacggccctaggcgtagcaactccagatccgcccgctgttggacgagatcctctgtctggcagtgggcaggcgcgttgtccaggacgatgacgatggtcttgccgagaaagtggtcgcggtacacgtcgtgggccttgaccgcgtcgtatacctcgtccacaaactcgtcattgacctccatcttgatgctgccacgacgcgtggcgtagtgcacgaggccgacttcgggggaacctgcgcactgcacctgtaagttagcccccttagagggagggagcttgacgatagcgcgttgtccgacaggagcgcgaccttgcgtccgcttacagtacaggttgtagttggtctcgtcataatacacgataaaagcaccgttccgctcatgcttcagcaacgcttcaccaaacacctcctcttctcgatatttacagcattattgcaggactcgggctctacgcgaacctatcacagggaacatacttagtacagtagatggtaaaagtgatagcataataacttgaaggcgtacctgcttaacagtgtaaagcttatcgcaaagcttcttactgatcaacgaagtgctgatgtgcaccctgaagtcgaacgcaagcatttcctgcatctgcacgagtatgtactggcagttgtcttccaggtagccaacgagagcttcctccatttctggagtacacttcgtgcacgccgcccgcgcgccgcctctcttcttgacatcagcggcttggcactggacgatgttgcgggcagtagtgggaaggatgccgttgcagtcggcaaccagcacccagtcacgcccttttcggtgtgcatcgagcacacgcgtgcgggccgcaagcccatgcttcggctcttggggcatgttgccggcggagacagtcggttactgaccagtgatttgagtttgctctgcactaaatccacattgctctaaatactaatttcagaaattattttccgatttttggatgttacttaagttacttcacagcgttttgctttacactgctgccaactcggattggcaaaggtgtagaaagcaatcagacaaagcgagtgagttagaattagaatgtcagggccgggagcggttcggcgagctctgtcatttcggacaagtgcatggcggcgacggcgatgtacacgttgcagggcaggccgttcgggccgtcgtatagctccggggtgaaatggccgtggccacgctgcgttccggcgaatgtcagagtggtgggaggtggcggcagctgctgcctcgactcgtcttgctcggtctcgggcttcgtctcggagttggtgtatggctaggcatcgatgggcgtctcggtcacgttctccgtctcgagctccgtgtatggctcggtgtatgtttcggctgtggtgatcatggggtcagcgatgtggtgtagtggagcggttcggcgagctctgtcacctcggacaagtgcgtggcggcgacagcgatgtacacgttgcagggcaggccgttcgggccgtcgtatagctccggggtgaaatggccgtggccacgctgcgttccggcgaatgtcagagtggtgggaggtggcggcagctgctgcctcgactcgtcttgctcggtctcgggcttcgtctcggagttggtgtatggctaggcatcgatgggcgtctcggtcacgttctccgtctcgagctccgtgtatggctcggtgtatgtttcggctgtggtgatcatggggtcagcgatgtggtgtagtggagcggttcggcgagctctgtcacctcggacaagtgcgtggcggcgacagcgatgtacacgttgcagggcaggccgttcgggccgtcgtatagctccggggtgaaatggccgtggccacgctgcgttccggcgaatgtcagagtggtgggaggtggcggcagctgctgcctcgactcgtcttgctcggtctcgggcttcgtctcggagttggtgtatggctaggcatcgatgggcgtctcggtcacgttctccgtctcgagctccgtgtatggctcggtgtatgtttcggctgtggtgatcatggggtcagcgatgtggtgtagtggagcggttcggcgagctctgtcacctcggacaagtgcatggcggcgacggcgatgtacacgttgcagggcaggccgttcgggccgtcgtatagctccggggtgaaatggccgtggccacgctgcgttccggcgaatgtcagagtggtgggaggtggcggcagctgctgcctcgactcgtcttgctcggtctcgggcttcgtcttggagttggtgtatggctaggcatcgatgggcgtctcggtcacgttctccgtctcgagctccgtgtatggctcggtgtatgtttcggctgtggtgatcatggggtcagcgatgtggtgtagtggagcggttcggcgagctctgtcacctcggacaagtgcatggcggcgacggcgatgtacacgttgcagggcaggccgttcgggccgtcgtatagctccggggtgaaatggccgtggccacgctgcgttccggcgaatgtcagagtggtgggaggtggcggcagctgctgcctcgactcgtcttgctcggtctcgggcttcgtctcggagttggtgtatggctaggcatcgatgggcgtctcggtcacgttctccgtctcgagctccgtgtatggctcggtgtatgtttcggctgtggtgatcatggggtcagcgatgtggtgtagtggagcggttcggcgagctctgtcacctcggacaagtgcgtggcggcgacagcgatgtacacgttgcagggcaggccgttcgggccgtcgtatagctccggggtgaaatggccgtggccacgctgcgttccggcgaatgtcagagtggtgggaggtggcggcagctgctgcctcgactcgtcttgctcggtctcgggcttcgtctcggagttggtgtatggctaggcatcgatgggcgtctcggtcacgttctccgtctcgagctccgtgtatggctcggtgtatgtttcggctgtggtgatcatggggtcagcgatgtggtgtagtggagcggttcggcgagctctgtcacctcggacaagtgcgtggcggcgacagcgatgtacacgttgcagggcaggccgttcgggccgtcgtatagctccggggtgaaatggccgtggccacgctgcgttccggcgcatgccagagtggtgggaggtggcggcagctgctgcctcgactcgtcttgctcggtctcgggcttcgtctcggagttggtgtatggctaggcatcgatgggcgtctcggtcacgttctccgtctcgagctccgtgtatggctcggtgtatgtttcggctgtggtgatcatggggtcagcgatgtggtgtagtggagcggttcggcgagctctgtcacctcggacaagtgcgtggcggcgacagcgatgtacacgttgcagggcaggccgttcgggccgtcgtatagctccggggtgaaatggccgtggccacgctgcgttccggcgaatgtcagagtggtgggaggtggcggcagctgctgcctcgactcgtcttgctcggtctcgggcttcgtctcggagttggtgtatggctaggcatcgatgggcgtctcggtcacgttctccgtctcgagctccgtgtatggctcggtgtatgtttcggctgtggtgatcatggggtcagcgatgtggtgtagtggagcggttcggcgagctctgtcacctcggacaagtgcgtggcggcgacagcgatgtacacgttgcagggcaggccgttcgggccgtcgtatagctccggggtgaaatggccgtggccacgctgcgttccggcgaatgtcagagtggtgggaggtggcggcagctgctgcctcgactcgtcttgctcggtctcgggcttcgtctcggagttggtgtatggctaggcatcgatgggcgtctcggtcacgttctccgtctcgagctccgtgtatggctcggtgtatgtttcggctgtggtgatcatggggtcagcgatgtggtgtagtggagcggttcggcgagctctgtcacctcggacaagtgcgtggcggcgacagcgatgtacacgttgcagggcaggccgttcgggccgtcgtatagctccggggtgaaatggccgtggccacgctgcgttccggcgaatgtcagagtggtgggaggtggcggcagctgctgcctcgactcgtcttgctcggtctcgggcttcgtctcggagttggtgtatggctaggcatcgatgggcgtctcggtcacgttctccgtctcgagctccgtgtatggctcggtgtatgtttcggctgtggtgatcatggggtcagcgatgtggtgtagtggagcggttcggcgagctctgtcacctcggacaagtgcgtggcggcgacagcgatgtacacgttgcagggcaggccgttcgggccgtcgtatagctccggggtgaaatggccgtggccacgctgcgttccggcgaatgccagagtggtgggaggtggcggcagctgctgcctcgactcgtcttgctcggtctcgggcttcgtctcggagttggtgtatggctaggcatcgatgggcgtctcggtcacgttctccgtctcgagctccgtgtatggctcggtgtatgtttcggctgtggtgatcatggggtcagcgatgtggtgtagtggagcggttcggcgagctctgtcacctcggacaagtgcgtggcggcgacagcgatgtacacgttgcagggcaggccgttcgggccgtcgtatagctccggggtgaaatggccgtggccacgctgcgttccggcgaatgtcagagtggtgggaggtggcggcagctgctgcctcgactcgtcttgctcggtctcgggcttcgtctcggagttggtgtatggctaggcatcgatgggcgtctcggtcacgttctccgtctcgagctccgtgtatggctcggtgtatgtttcggctgtggtgatcatggggtcagcgatgtggtgtagtggagcggttcggcgagctctgtcacctcggacaagtgcatggcggcgacggcgatgtacacgttgcagggcaggccgttcgggccgtcgtatagctccggggtgaaatggccgtggccacgctgcgttccggcgaatgtcagagtggtgggaggtggcggcagctgctgcctcgactcgtcttgctcggtctcgggcttcgtctcggagttggtgtatggctaggcatcgatgggcgtctcggtcacgttctccgtctcgagctccgtgtatggctcggtgtatgtttcggctgtggtgatcatggggtcagcgatgtggtgtagtggagcggttcggcgagctctgtcacctcggacaagtgcgtggcggcgacagcgatgtacacgttgcagggcaggccgttcgggccgtcgtatagctccggggtgaaatggccgtggccacgctgcgttccggcgaatgtcagagtggtgggaggtggcggcagctgctgcctcgactcgtcttgctcggtctcgggcttcgtctcggagttggtgtatggctaggcatcgatgggcgtctcggtcacgttctccgtctcgagctccgtgtatggctcggtgtatgtttcggctgtggtgatcatggggtcagcgatgtggtgtagtggagcggttcggcgagctctgtcacctcggacaagtgcatggcggcgacggcgatgtacacgttgcagggcaggccgttcgggccgtcgtatagctccggggtgaaatggccgtggccacgctgcgttccggcgaatgccagagtggtgggaggtggcggcagctgctgcctcgactcgtcttgctcggtctcgggcttcgtctcggagttggtgtatggctaggcatcgatgggcgtctcggtcacgttctccgtctcgagctccgtgtatggctcggtgtatgtttcggctgtggtgatcatggggtcagcgatgtggtgtagtggagcggttcggcgagctctgtcacctcggacaagtgcgtggcggcgacagcgatgtacacgttgcagggcaggccgttcgggccgtcgtatagctccggggtgaaatggccgtggccacgctgcgttccggcgaatgtcagagtggtgggaggtggcggcagctgctgcctcgactcgtcttgctcggtctcgggcttcgtctcggagttggtgtatggctaggcatcgatgggcgtctcggtcacgttctccgtctcgagctccgtgtatggctcggtgtatgtttcggctgtggtgatcatggggtcagcgatgtggtgtagtggagcggttcggcgagctctgtcacctcggacaagtgcatggcggcgacggcgatgtacacgttgcagggcaggccgttcgggccgtcgtatagctccggggtgaaatggccgtggccacgctgcgttccggcgaatgccagagtggtgggaggtggcggcagctgctgcctcgactcgtcttgctcggtctcgggcttcgtctcggagttggtgtatggctaggcatcgatgggcgtctcggtcacgttctccgtctcgagctccgtgtatggctcggtgtatgtttcggctgtggtgatcatggggtcagcgatgtggtgtagtggagcggttcggcgagctctgtcacctcggacaagtgcgtggcggcgacagcgatgtacacgttgcagggcaggccgttcgggccgtcgtatagctccggggtgaaatggccgtggccacgctgcgttccggcgaatgtcagagtggtgggaggtggcggcagctgctgcctcgactcgtcttgctcggtctcgggcttcgtctcggagttggtgtatggctaggcatcgatgggcgtctcggtcacgttctccgtctcgagctccgtgtatggctcggtgtatgtttcggctgtggtgatcatggggtcagcgatgtggtgtagtggagcggttcggcgagctctgtcacctcggacaagtgcatggcggcgacggcgatgtacacgttgcagggcaggccgttcgggccgtcgtatagctccggggtgaaatggccgtggccacgctgcgttccggcgaatgtcagagtggtgggaggtggcggcagctgctgcctcgactcgtcttgctcggtctcgggcttcgtcttggagttggtgtatggctaggcatcgatgggcgtctcggtcacgttctccgtctcgagctccgtgtatggctcggtgtatgtttcggctgtggtgatcatggggtcagcgatgtggtgtagtggagcggttcggcgagctctgtcacctcggacaagtgcatggcggcgacggcgatgtacacgttgcagggcaggccgttcgggccgtcgtatagctccggggtgaaatggccgtggccacgctgcgttccggcgaatgtcagagtggtgggaggtggcggcagctgctgcctcgactcgtcttgctcggtctcgggcttcgtcttggagttggtgtatggctaggcatcgatgggcgtctcggtcacgttctccgtctcgagctccgtgtatggctcggtgtatgtttcggctgtggtgatcatggggtcagcgatgtggtgtagtggagcggttcggcgagctctgtcacctcggacaagtgcatggcggcgacggcgatgtacacgttgcagggcaggccgttcgggccgtcgtatagctccggggtgaaatggccgtggccacgctgcgttccggcgaatgtcagagtggtgggaggtggcggcagctgctgcctcgactcgtcttgctcggtctcgggcttcgtctcggagttggtgtatggctaggcatcgatgggcgtctcggtcacgttctccgtctcgagctccgtgtatggctcggtgtatgtttcggctgtggtgatcatggggtcagcgatgtggtgtagtggagcggttcggcgagctctgtcacctcggacaagtgcgtggcggcgacagcgatgtacacgttgcagggcaggccgttcgggccgtcgtatagctccggggtgaaatggccgtggccacgctgcgttccggcgaatgtcagagtggtgggaggtggcggcagctgctgcctcgactcgtcttgctcggtctcgggcttcgtctcggagttggtgtatggctaggcatcgatgggcgtctcggtcacgttctccgtctcgagctccgtgtatggctcggtgtatgtttcggctgtggtgatcatggggtcagcgatgtggtgtagtggagcggttcggcgagctctgtcacctcggacaagtgcatggcggcgacggcgatgtacacgttgcagggcaggccgttcgggccgtcgtatagctccggggtgaaatggccgtggccacgctgcgttccggcgaatgtcagagtggtgggaggtggcggcagctgctgcctcgactcgtcttgctcggtctcgggcttcgtctcggagttggtgtatggctaggcatcgatgggcgtctcggtcacgttctccgtctcgagctccgtgtatggctcggtgtatgtttcggctgtggtgatcatggggtcagcgatgtggtgtagtggagcggttcggcgagctctgtcacctcggacaagtgcgtggcggcgacagcgatgtacacgttgcagggcaggccgttcgggccgtcgtatagctccggggtgaaatggccgtggccacgctgcgttccggcgaatgtcaaagtggtgggaggtggcggcagctgctgcccgagctctgtcacctcggacaagtgcatggcggcgacggcgatgtacacgttgcagggcaggccgttcgggccgtcgtatagctccggggtgaaatggccgtggccacgctgcgttccggcgaatgccagagtggtgggaggtggcggcagctgctgcctcgactcgtcttgctcggtctcgggcttcgtctcggagttggtgtatggctaggcatcgatgggcgtctcggtcacgttctccgtctcgagctccgtgtatggctcggtgtatgtttcggctgtggtgatcatggggtcagcgatgtggtgtagtggagcggttcggcgagctctgtcacctcggacaagtgcgtggcggcgacagcgatgtacacgttgcagggcaggccgttcgggccgtcgtatagctccggggtgaaatggccgtggccacgctgcgttccggcgaatgtcagagtggtgggaggtggcggcagctgctgcctcgactcgtcttgctcggtctcgggcttcgtctcggagttggtgtatggctaggcatcgatgggcgtctcggtcacgttctccgtctcgagctccgtgtatggctcggtgtatgtttcggctgtggtgatcatggggtcagcgatgtggtgtagtggagcggttcggcgagctctgtcacctcggacaagtgcgtggcggcgacagcgatgtacacgttgcagggcaggccgttcgggccgtcgtatagctccggggtgaaatggccgtggccacgctgcgttccggcgaatgtcagagtggtgggaggtggcggcagctgctgcctcgactcgtcttgctcggtctcgggcttcgtctcggagttggtgtatggctaggcatcgatgggcgtctcggtcacgttctccgtctcgagctccgtgtatggctcggtgtatgtttcggctgtggtgatcatggggtcagcgatgtggtgtagtggagcggttcggcgagctctgtcacctcggacaagtgcgtggcggcgacagcgatgtacacgttgcagggcaggccgttcgggccgtcgtatagctccggggtgaaatggccgtggccacgctgcgttccggcgaatgtcagagtggtgggaggtggcggcagctgctgcctcgactcgtcttgctcggtctcgggcttcgtctcggagttggtgtatggctaggcatcgatgggcgtctcggtcacgttctccgtctcgagctccgtgtatggctcggtgtatgtttcggctgtggtgatcatggggtcagcgatgtggtgtagtggagcggttcggcgagctctgtgcatggcggcgacggcgatgtacacgttgcagggcaggccgttcgggccgtcgtatagctccggggtgaaatggccgtggccacgctgcgttccggcgaatgtcagagtggtgggaggtggcggcagctgctgcctcgactcgtcttgctcggtctcgggcttcgtctcggagttggtgtatggctaggcatcgatgggcgtctcggtcacgttctccgtctcgagctccgtgtatggctcggtgtatgtttcggctgtggtgatcatggggtcagcgatgtggtgtagtggagcggttcggcgagctctgtcacctcggacaagtgcgtggcggcgacagcgatgtacacgttgcagggcaggccgttcgggccgtcgtatagctccggggtgaaatggccgtggccacgctgcgttccggcgaatgtcagagtggtgggaggtggcggcagctgctgcctcgactcgtcttgctcggtctcgggcttcgtctcggagttggtgtatggctaggcatcgatgggcgtctcggtcacgttctccgtctcgagctccgtgtatggctcggtgtatgtttcggctgtggtgatcatggggtcagcgatgtggtgtagtggagcggttcggcgagctctgtcacctcggacaagtgcgtggcggcgacagcgatgtacacgttgcagggcaggccgttcgggccgtcgtatagctccggggtgaaatggccgtggccacgctgcgttccggcgaatgccagagtggtgggaggtggcggcagctgctgcctcgactcgtcttgctcggtctcgggcttcgtctcggagttggtgtatggctaggcatcgatgggcgtctcggtcacgttctccgtctcgagctccgtgtatggctcggtgtatgtttcggctgtggtgatcatggggtcagcgatgtggtgtagtggagcggttcggcgagctctgtcacctcggacaagtgcgtggcggcgacagcgatgtacacgttgcagggcaggccgttcgggccgtcgtatagctccggggtgaaatggccgtggccacgctgcgttccggcgaatgtcagagtggtgggaggtggcggcagctgctgcctcgactcgtcttgctcggtctcgggcttcgtctcggagttggtgtatggctaggcatcgatgggcgtctcggtcacgttctccgtctcgagctccgtgtatggctcggtgtatgtttcggctgtggtgatcatggggtcagcgatgtggtgtagtggagcggttcggcgagctctgtcacctcggacaagtgcgtggcggcgacagcgatgtacacgttgcagggcaggccgttcgggccgtcgtatagctccggggtgaaatggccgtggccacgctgcgttccggcgaatgccagagtggtgggaggtggcggcagctgctgcctcgactcgtcttgctcggtctcgggcttcgtctcggagttggtgtatggctaggcatcgatgggcgtctcggtcacgttctccgtctcgagctccgtgtatggctcggtgtatgtttcggctgtggtgatcatggggtcagcgatgtggtgtagtggagcggttcggcgagctctgtcacctcggacaagtgcgtggcggcgacagcgatgtacacgttgcagggcaggccgttcgggccgtcgtatagctccggggtaaaatggccgtggccacgctgcgttccggcgaatgccagagtggtgggaggtggcggcagctgctgcctcgactcgtcttgctcggtctcgggcttcgtctcggagttggtgtatggctaggcatcgatgggcgtctcggtcacgttctccgtctcgagctccgtgtatggctcggtgtatgtttcggctgtggtgatcatggggtcagcgatgtggtgtagtggagcggttcggcgagctctgtcacctcggacaagtgcgtggcggcgacagcgatgtacacgttgcagggcaggccgttcgggccgtcgtatagctccggggtgaaatggccgtggccacgctgcgttccggcgaatgccagagtggtgggaggtggcggcagctgctgcctcgactcgtcttgctcggtctcgggcttcgtctcggagttggtgtatggctaggcatcgatgggcgtctcggtcacgttctccgtctcgagctccgtgtatggctcggtgtatgtttcggctgtggtgatcatggggtcagcgatgtggtgtagtggagcggttcggcgagctctgtcacctcggacaagtgcgtggcggcgacagcgatgtacacgttgcagggcaggccgttcgggccgtcgtatagctccggggtgaaatggccgtggccacgctgcgttccggcgaatgccagagtggtgggaggtggcggcagctgctgcctcgactcgtcttgctcggtctcgggcttcgtctcggagttggtgtatggctaggcatcgatgggcgtctcggtcacgttctccgtctcgagctccgtgtatggctcggtgtatgtttcggctgtggtgatcatggggtcagcgatgtggtgtagtggagcggttcggcgagctctgtcacctcggacaagtgcgtggcggcgacagcgatgtacacgttgcagggcaggccgttcgggccgtcgtatagctccggggtgaaatggccgtggccacgctgcgttccggcgaatgtcaaagtggtgggaggtggcggcagctgctgcctcgactcgtcttgctcggtctcgggcttcgtctcggagttggtgtatggctaggcatcgatgggcgtctcggtcacgttctccgtctcgagctccgtgtatggctcggtgtatgtttcggctgtggtgatcatggggtcagcgatgtggtgtagtggagcggttcggcgagctctgtcacctcggacaagtgcgtggcggcgacagcgatgtacacgttgcagggcaggccgttcgggccgtcgtatagctccggggtgaaatggccgtggccacgctgcgttccggcgaatgtcatagtggtgggaggtggcggcagctgctgcctcgactcgtcttgctcggtctcgggcttcgtctcggagttggtgtatggctaggcatcgatgggcgtctcggtcacgttctccgtctcgagctccgtgtatggctcggtgtatgtttcggctgtggtgatcatggggtcagcgatgtggtgtagtggagcggttcggcgagctctgtcacctcggacaagtgcatggcggcgacggcgatgtacacgttgcagggcaggccgttcgggccgtcgtatagctccggggtgaaatggccgtggccacgctgcgttccggcgaatgtcagagtggtgggaggtggcggcagctgctgcctcgactcgtcttgctcggtctcgggcttcgtctcggagttggtgtatggctaggcatcgatgggcgtctcggtcacgttctccgtctcgagctccgtgtatggctcggtgtatgtttcggctgtggtgatcatggggtcagcgatgtggtgtagtggagcggttcggcgagctctgtcacctcggacaagtgcatggcggcgacggcgatgtacacgttgcagggcaggccgttcgggccgtcgtatagctccggggtgaaatggccgtggccacgctgcgttccggcgaatgtcagagtggtgggaggtggcggcagctgctgcctcgactcgtcttgctcggtctcgggcttcgtctcggagttggtgtatggctaggcatcgatgggcgtctcggtcacgttctccgtctcgagctccgtgtatggctcggtgtatgtttcggctgtggtgatcatggggtcagcgatgtggtgtagtggagcggttcggcgagctctgtcacctcggacaagtgcgtggcggcgacagcgatgtacacgttgcagggcaggccgttcgggccgtcgtatagctccggggtgaaatggccgtggccacgctgcgttccggcgaatgccagagtggtgggaggtggcggcagctgctgcctcgactcgtcttgctcggtctcgggcttcgtctcggagttggtgtatggctaggcatcgatgggcgtctcggtcacgttctccgtctcgagctccgtgtatggctcggtgtatgtttcggctgtggtgatcatggggtcagcgatgtggtgtagtggagcggttcggcgagctctgtcacctcggacaagtgcgtggcggcgacagcgatgtacacgttgcagggcaggccgttcgggccgtcgtatagctccggggtgaaatggccgtggccacgctgcgttccggcgaatgtcagagtggtgggaggtggcggcagctgctgcctcgactcgtcttgctcggtctcgggcttcgtctcggagttggtgtatggctaggcatcgatgggcgtctcggtcacgttctccgtctcgagctccgtgtatggctcggtgtatgtttcggctgtggtgatcatggggtcagcgatgtggtgtagtggagcggttcggcgagctctgtcacctcggacaagtgcatggcggcgacggcgatgtacacgttgtagggcaggccgttcgggccgtcgtatagctccggggtgaaatggccgtggccacgctgcgttccggcgaatgccagagtggtgggaggtggcggcagctgctgcctcgactcgtcttgctcggtctcgggcttcgtctcggagttggtgtatggctaggcatcgatgggcgtctcggtcacgttctccgtctcgagctccgtgtatggctcggtgtatgtttcggctgtggtgatcatggggtcagcgatgtggtgtagtggagcggttcggcgagctctgtcacctcggacaagtgcgtggcggcgacagcgatgtacacgttgcagggcaggccgttcgggccgtcgtatagctccggggtgaaatggccgtggccacgctgcgttccggcgaatgtcagagtggtgggaggtggcggcagctgctgcctcgactcgtcttgctcggtctcgggcttcgtctcggagttggtgtatggctaggcatcgatgggcgtctcggtcacgttctccgtctcgagctccgtgtatggctcggtgtatgtttcggctgtggtgatcatggggtcagcgatgtggtgtagtggagcggttcggcgagctctgtcacctcggacaagtgcgtggcggcgacagcgatgtacacgttgcagggcaggccgttcgggccgtcgtatagctccggggtgaaatggccgtggccacgctgcgttccggcgaatgtcagagtggtgggaggtggcggcagctgctgcctcgactcgtcttgctcggtctcgggcttcgtctcggagttggtgtatggctaggcatcgatgggcgtctcggtcacgttctccgtctcgagctccgtgtatggctcggtgtatgtttcggctgtggtgatcatggggtcagcgatgtggtgtagtggagcggttcggcgagctctgtcacctcggacaagtgcgtggcggcgacagcgatgtacacgttgcagggcaggccgttcgggccgtcgtatagctccggggtgaaatggccgtggccacgctgcgttccggcgaatgccagagtggtgggaggtggcggcagctgctgcctcgactcgtcttgctcggtctcgggcttcgtctcggagttggtgtatggctaggcatcgatgggcgtctcggtcacgttctccgtctcgagctccgtgtatggctcggtgtatgtttcggctgtggtgatcatggggtcagcgatgtggtgtagtggagcggttcggcgagctctgtcacctcggacaagtgcgtggcggcgacagcgatgtacacgttgcagggcaggccgttcgggccgtcgtatagctccggggtgaaatggccgtggccacgctgcgttccggcgaatgtcagagtggtgggaggtggcggcagctgctgcctcgactcgtcttgctcggtctcgggcttcgtctcggagttggtgtatggctaggcatcgatgggcgtctcggtcacgttctccgtctcgagctccgtgtatggctcggtgtatgtttcggctgtggtgatcatggggtcagcgatgtggtgtagtggagcggttcggcgagctctgtcacctcggacaagtgcatggcggcgacggcgatgtacacgttgcagggcaggccgttcgggccgtcgtatagctccggggtgaaatggccgtggccacgctgcgttccggcgaatgtcagagtggtgggaggtggcggcagctgctgcctcgactcgtcttgctcggtctcgggcttcgtctcggagttggtgtatggctaggcatcgatgggcgtctcggtcacgttctccgtctcgagctccgtgtatggctcggtgtatgtttcggctgtggtgatcatggggtcagcgatgtggtgtagtggagcggttcggcgagctctgtcacctcggacaagtgcatggcggcgacggcgatgtacacgttgcagggcaggccgttcgggccgtcgtatagctccggggtgaaatggccgtggccacgctgcgttcgcgatgtggtgtagtggagcggttcggcgagctctgtcacctcggacaagtgcgtggcggcgacagcgatgtacacgttgcagggcaggccgttcgggccgtcgtatagctccggggtgaaatggccgtggccacgctgcgttccggcgaatgtcagagtggtgggaggtggcggcagctgctgcctcgactcgtcttgctcggtctcgggcttcgtctcggagttggtgtatggctaggcatcgatgggcgtctcggtcacgttctccgtctcgagctccgtgtatggctcggtgtatgtttcggctgtggtgatcatggggtcagcgatgtggtgtagtggagcggttcggcgagctctgtcacctcggacaagtgcgtggcggcgacagcgatgtacacgttgcagggcaggccgttcgggccgtcgtatagctccggggtgaaatggccgtggccacgctgcgttccggcgaatgtcagagtggtgggaggtggcggcagctgctgcctcgactcgtcttgctcggtctcgggcttcgtctcggagttggtgtatggctaggcatcgatgggcgtctcggtcacgttctccgtctcgagctccgtgtatggctcggtgtatgtttcggctgtggtgatcatggggtcagcgatgtggtgtagtggagcggttcggcgagctctgtcacctcggacaagtgcatggcggcgacggcgatgtacacgttgcagggcaggccgttcgggccgtcgtatagctccggggtgaaatggccgtggccacgctgcgttccggcgaatgtcagagtggtgggaggtggcggcagctgctgcctcgactcgtcttgctcggtctcgggcttcgtctcggagttggtgtatggctaggcatcgatgggcgtctcggtcacgttctccgtctcgagctccgtgtatggctcggtgtatgtttcggctgtggtgatcatggggtcagcgatgtggtgtagtggagcggttcggcgagctctgtcacctcggacaagtgcgtggcggcgacagcgatgtacacgttgcagggcaggccgttcgggccgtcgtatagctccggggtgaaatggccgtggccacgctgcgttccggcgaatgtcagagtggtgggaggtggcggcagctgctgcctcgactcgtcttgctcggtctcgggcttcgtctcggagttggtgtatggctaggcatcgatgggcgtctcggtcacgttctccgtctcgagctccgtgtatggctcggtgtatgtttcggctgtggtgatcatggggtcagcgatgtggtgtagtggagcggttcggcgagctctgtcacctcggacaagtgcgtggcggcgacagcgatgtacacgttgcagggcaggccgttcgggccgtcgtatagctccggggtgaaatggccgtggccacgctgcgttccggcgaatgtcagagtggtgggaggtggcggcagctgctgcctcgactcgtcttgctcggtctcgggcttcgtctcggagttggtgtatggctaggcatcgatgggcgtctcggtcacgttctccgtctcgagctccgtgtatggctcggtgtatgtttcggctgtggtgatcatggggtcagcgatgtggtgtagtggagcggttcggcgagctctgtcacctcggacaagtgcatggcggcgacggcgatggtcacgttgcagggcaggccgttcgggccgtcgtatagctccggggtgaaatggccgtggccacgctgcgttccggcgaatgccagagtggtgggaggtggcggcagctgctgcctcgactcgtcttgctcggtctcgggcttcgtctcggagttggtgtatggctaggcatcgatgggcgtctcggtcacgttctccgtctcgagctccgtgtatggctcggtgtatgtttcggctgtggtgatcatggggtcagcgatgtggtgtagtggagcggttcggcgagctctgtcacctcggacaagtgcatggcggcgacggcgatgtacacgttgcagggcaggccgttcgggccgtcgtatagctccggggtgaaatggccgtggccacgctgcgttccggcgaatgccagagtggtgggaggtggcggcagctgctgcctcgactcgtcttgctcggtctcgggcttcgtctcggagttggtgtatggctaggcatcgatgggcgtctcggtcacgttctccgtctcgagctccgtgtatggctcggtgtatgtttcggctgtggtgatcatgggggtcagcgatgtggtgtggtggagcggttcggcgagctctgtcacctcggacaagtgcatggcggcgacggcgatgtacacgttgcagggcaggccgttcgggccgtcgtatagctccggggtgaaatggccgtggccacgctgcgttccggcgaatgccagagtggtgggaggtggcggcagctgctgcctcgactcgtcttgctcggtctcgggcttcgtctcggagttggtgtatggctaggcatcgatgggcgtctcggtcacgttctccgtctcgagctccgtgtatggctcggtgtatgtttcggctgtggtgatcatgggggtcagcgatgtggtgtggtggagcggttcggcgagctctgtcacctcggacaagtgcatggcggcgacggcgatggtcacgttgcagggcaggccgttcgggccgtcgtatagctccggggtgaaatggccgtggccacgctgcgttccggcgaatgtcagagtggtgggaggtggcggcagctgctgcctcgactcgtcttgctcggtctcgggcttcgtctcggagttggtgtatggctaggcatcgatgggcgtctcggtcacgttctccgtctcgagctccgtgtatggctcggtgtatgtttcggctgtggtgaccatgggggtcagcgatgtggtgtggtggagcggttcggcgagctctgtcacctcggacaagtgcatggcggcgacggcgatggtcacgttgcagggcaggccgttcgggccgtcgtatagctccggggtgaaatggccgtggccacgctgcgttccggcgaatgtcagagtggtgggaggtggcggcagctgctgcctcgactcgtcttgctcggtctcgggcttcgtctcggagttggtgtatggctaggcatcgatgggcgtctcggtcacgttctccgtctcgagctccgtgtatggctcggtatatgtttcggctgcggtgggcatggaagtgagtgacgtggtgtattggcagctggtgggcgagctgcgtcaccgtgttgccgtgcatggttaagggtttaattatgtggaaagtgcacgaagttgcgtcacgaatgcagaaaaaagtacttgaagtaggtaatacaaaccgttgcagaggtactgagccgtcaatcacctggaagccattcgtcgtcttcttcgcttgagcgttcgttctcatcttcgctgtcatcctgcaatacaaaacaaagttatgaaatacctcggctaaatgcacgtacttggcttacccgatgagcccagagccgctctcgtgcacgctgattgcgctcttcgcgctggacctccgctcgatcttcaggggtgagatcttctacgggttcaatgatattacggcgctgggcccctgctcggtcttggtgtacacgtagttggcgctgggcctccgcttgatcttcgggggtaagatttcttgcaggttcgatagtgttgtgccactggacctcagcactcatttcgataccgtcatagatccattgtactacccggatataagggtaacgctgatcgtcgggctcatcggcggcatttcttgccgcggaaatttcgggcgcgtcgtctggaatcacgacgggttctagttgatgtaggaaatccgctagacgtctttcagcaacttggtccgggcgctgcacaggttgaccgtgttcggatcgccctgcggcttggctgtgggccatctcgacctggttggaatgggctgggccctgctgtacggccggccctggtccacgaggatcaagagcggtagcgcgggctggattaggttctggtgcacgaggatcataggcagtagcgtgagctgggagtaggagttctaggttgttttgatgttgatgttcggggccctcttccattggtgtttgttgcacttggtgtggcggattcgggggaggctggggttcctgttgaagctcgacaaaagcattcaccacatcgggccttctaataaggcgtggcggccccagcacaaattctatgatgtgtcggcggatgtgttgtccttgaacaccttggcgcatgaattcacgacgcaacgcgtccattgcgctgcccgtcatcgagactccgtgcggcaacattcttctgcattgcatacggaattgaccacccgagatcatttcccatgcgagacctgcaaaatacgtatataaatgtccactgaggttgctaggcgctatgacattgcagaaggcaacctaaaaataatctttatgtagttgacgttctaaacttgtcgcccttgccgtcctcgccgccctcgcggcactcgtctctcatcctggacgcatatgtttctacacaaaaaggaagcgagcccacacgcactttggctccatactataatgcatatatttgacctacagactatgattggcctaaaacgtgtctagccttcccatagttgagatctgcggccgggtaggaagagtcgccttgaggcccgccaacgatggcctctgccgggagtgcggctagaaggcaggaacaactttggccccgaggccaaaacagcgatggaccacggaaccccacactgcaatctactttgcgttagacaagcgactgatcggtaactgtagcatagccgatttttctgtgcagcgttcgctcatggggaggtgcagcgtttgctcaccgaatgagcgtagtgtcttcagtcactattatcggcgcggcgtttgctcgccagcctattatgaaacttagtttttttctaacactagtgtgctttacgaaacagttcctcggagaggacgacaactctgtagaccgttgagctcgtcacatagcttcatagaagccgtccgtcaggtcgatggcgctatagatgacgctacctggcatggagtcgagtaccatgtccttccgcgggatcggggtctgtgtcgggatggtcgcagcttattgaacacgtggacgatgcgccagccgccagtcgccttcttcacacagaacgtggggctagagtgtggggaggtgctatcgcggacgtggccagccaggcggcgcttttcgaagaactcgtcgatggccttgacctggtctcgcggtagtggctactgccgcgtcacgcagtacttcgttccgggcgcgaggtcgatctcgtgccgaactccgcggtcggctggaagctcggcggggatctcatcagggaagacgtcttcaaactcgcgcgcggtatcgtagactgggttacccgacttcttcagcgcttcccaggactgcgctgcgaatcgctcttcgcgggcagacttcggttcggcactcctcggccgcgacgacgcgtcgtcaccgctgagtgcgtgaagaccctcggctgtcccgttggtctcggtgatcaaacacacctgctcgatgtcaccagccttcggatcgcgaaggaagtgtttccacgagagcccggggagccgagtgattccgcgagcgtcgcgaggtggactcgcgacttcgatgacccgcgtgccccgtccacgtattcgacagcgcagacagattccgtcgggggaggtgcggttttagtgttgttccgtggcctgagacgctgtcgcttggatttcctcctcttcctcctcgaagacctcgagcaggagctcgaggtggacgactcgctggcactggacgacacattgtcgctatcgctggacgatacttcaccctcctctaggtgcggagtgtcgagcccgtccgcaccggaagtacgcgggagcaccgcttgctcgaccgccttgttgattcgcgggagcccacgtcgctcgaccgcttcgttggggcgcgggagcccacgtcgctcgaccgcctcgttggttcgcgggagtcgccttcgctcgaccgccctcgcaacaacctcgcttcgctgcgaggttttgggttcatttgtcggttcatccaacagcaccgcacatgccatacagagagggccatcgctcgctctgtgtagggcttgcgtcgtggatgaacgatccacgacggtaacgtggggccagtccgtcggagcgaccaggagatgagtgaacacttcactcacatcgtagtcggctcgacgcttgaccgatcgggccagccagtcgatcttcggctgataccgtgtcagccacggtatgtccaagatgcagtcgaacgcgtagttcatctcgatcaccaggaagtcgtcgttgctacggaagccgtcgaacgtgtacggcgcgtgatatcatgccgtgggacacggtgtggcatgccgtcagcgagcttaatgaagacgacgccgggaccctcgcagacggatatgtccgaggaaagaagcgacaaacacgaggcgtggaagaagttgttcgttgcgcccgaatccaggagcgcacggagaggacgccgcgcgccggcgacgtgcaggctgacgatgatcagtctgtggtcgccgctggtggtggtggcattgaagtgtgcgtgaagcagtgggggctaggagatcgggttgccaccgggggacccggacctccgttccagccagtagggcgccccgcacctactggtcccggtcgttttttgttgaacggccaggagctcatcgtcggcgcgagcgactgcagcgtgcatcggcgcaggcgcgtggcagattgccgcgcgatgacccaacttcccacaacggtggcaggtcagcgaacgagaattgcggccgccgcgcgagtagtaccgccggttattcttcgcggcttcgacggcatcgatttccattggctcgggcatcgctgcccgagtgtccgccggcaactgtcgcgagtacgaagcggataccgtgtagtcctcgcgcaatgcgaggacgaacgcttcttccagcgacttcggctcggcacgcgtgagacagtagcgcgtcattccttctcgcatgccaaacacgaagacgtggacctgcgaagccatgtcgatggggctcgtgacgatgcacgaggccaggtgacgagtcttctgtacgtagtcgcgcatggacagcttgccaggcttcaacgcgaagaacgcagcacgcatccgcgattcgtcttgcggaggctcgaacgcaagtcgaaggtctttctggagactgtccagactcgggaaggcgtgttggtctacaacaagcttgccaagggcccactccttcgccttccccgacaaacgcaacaggaggaagttcactttcgccgtcggcgcctcgatcagtctcgaggcgatggcgacgtcgatctccctgaaccagcggttcaggggcagtcggtcttggccggcgccggaatacgtcgacgtctccatcttcaccgcatcgttcctgaatgcgagggagttgacactcgccgcttggcatcggcgagctcgcgttccatgaactcttgggcagcctggcgttgttggtcggtggtcgctgagctcagcagcgacgtgacgacgaactcgccggacacggcagcgaggcggtgaagagcttcccactcaacccgggtgaggtggggaaaactcgtgtggtcaagggttacaccggacccttcggacatcagaacttggctcatcttggtcttggacgttggaaggactacaaagtgctaccaggtgtaacggggtaagagataccgtcactagcgtacactgtagataagaggaagcttgcaataataagctcaagtcttgtctttagggtaaaatcaactctgtttaagtatgggacgggggacggaggcccccttacccttgtgaaccactcaaatctaagtctgcacctgattggatgaaatgggtctggctccccactttcaaccaatcagaacatgacagcaggtcacgcgctagccgtgtgactgcacctacttttgtgtatgtacctatgtaacatctacctacttatgtaaatgggccctttacacaacacaaatgaattcgagaagggttcattagtcttgttagctactcaaaacctgcctaaacatgcagtttccgacttcggggcgagcaagctcgctccgcgcttcatcggaccgttcactgtgctggcacggcacggcaacgcctacacactggacataccgtctagtatgcgcctccatccgacgttctacgtcggacggctgaagccatacctgcagcacgagctacctagcttgactgaaccgaagcagaagactcggtggaagccgtcatcctctccagcgcgacttcgcgctggagcagcgggtcgggctaatggtccagctcggccggaacgatcgaggcggtctgggaggccgccgcaacctgaggatacttcagagcgccgaacccagcgctctggaactactccacgaccggaactcggtcgtggggagacgcgagatcagggtcaacaccaagttgaccacatacggggcgtgtttccaccaccaccgccaccaattcgtgacgcacacggctcaactcgatggatagttgagcggattgttggtcacagtatcccgagaacgagcaggcaaccggttcgttttcgtatccgttggagaggattccctcccaaccaagatacatgggagccgcggaacgtcttgctcgaagacgtcccggacatggtgagtgcatacgaagcccaccatgcgctacatactggaacgtaatgcgagcgctgctgttaacagcagcgcccgaagacacttcgagagcagacgtaggtacctgcccccgcgacagcgacgcgcttcgcatgttgctgcgcatgctacccagtagcagagaggttctccgctgctgcgccagcggtcttcaacttcgacgcgctcgtttcattacgagcgcgctctcttcaacgtcacgcattgaccaagcggtcaatggtggttgacgtgccgggaccgtcacgtctaaccttgacggggggatggtgtaacggggttacacgcacaagtggctacagtcacttgttactctaacagatgcgatgtctgttagaggtttggacacttcctcgaccttggtgtaaggtacaccaatggctacatacatttacgaccaccgcgacgggtggcatacaggattcctattggctgaaagcagcatcttttagccaatgagtgacttgcatgttagcagaatcctgccaactagccgttggcagattcctagtttagaatattacatttagaggaagtcagaaacataaaacaaaaatagcagttctcatcttttaccaaaacccgctacttggagcctttatcttgtttaaagtatactcgtggatctcgagtatacttaactcaagtaaagaaacctacgcttcctcatacacgtgcgcatacgtgtaagccgtagtagtgagccaaggtaggcccattacatagctcctctcgagcttcagcccgccataccatggacctcagcaaacgctttggtgaagagggagaggtgttcgacaccgagtccgtgacgggttctccgaaccaagatgatgatgcctcttcgaccacgccatcaacacgccgtgcaaagggcttgaccccagttggttctccgaaccgtcgcgagcctgagcgccccgcgtgcacttctcctgtgcgctctctgagccgtctcgccactgagcgcgctgcgccatcgagggaggagccgcggccaccgctgcgaactcggaacccgttccctgagcgctcttccggcctctacgagctgcacgcgctcactgagccacgctattcgccacctcgtggtgagggcgtgcccctgggccccgtcatctccaaccctttggacgaagctcagtccgagcaggttgtggcgcagatggctcccctgcgctctcagcgccccgagctgcggcctctgctgaaccccagcactgctgactacggcttccgacctcgcgaccccgcggaggcttgtcgccaggcgttccagcagtctcttgcgctgcacgccattgggcccgcggcccgtacgtctctgcgagagcggctcctcacaccacagtctacgactttcgcggagtatagcgagaggctgcggctgcaagcccaacagaagtccgtgcccgccatgcggacgtacccggtggtacttagcccgggggaagactcaattgagtacgaagctcagttcgagtcttgggccgagcacagccggaagctcagctccatggatgctctccgagccagcttcagtgaagtgggtgttcgcattgaacgcaagctccgcttcgatttcgcgaaggtccgagccaagcgcagcctctcgccactcgcccagccgcagacccattttagcgctgcgcgcttcgctccttcgagcactccagccgctccttcccgcgagggagtgagcgctgtggctcagggtcagcctcggagcaatgtggctgacccagcagctccccagcttattgccgggaagcgcgggacggccggcgtgccggccttgagccctcggggcgctggtgatcaagcttatcaaaagcgtccacgacgtctgggcagttggcggaggggcacctcaaactcccatgagttctcggagtgagggtaccctcgccatttcaccagatactggttttgaccccggcaccgccgcttcgccaggaggcgctccacatggtaatatagattcccatgctcatcgagcagagccggtgggggccgctgtggggccctttgcgactcaagatgagctcttggaggcgcggcagcaggcgggccgccttcgggatcacaaccatgacgttgatgcgcgtctggtccggactgccactgaactcgaccagctcgccgagcggacgcaatggatcgaggtgactcgggaggtctgggaccgccttggggccctggagggctgggtgcgatactatcgcgatcgcgatgagctcggggagctacagcgtgagcaggctgtgcttcagtgtcaactcgacctcctggcccgcatgcaggctccgactgctgcgcctgcgactctcgctgtgcccgcggcacctccggcgccgattcttccgcctgtgcctgcggtgcccgcgttgatggtcgcgtcctcgacgaccgcgacgtccgcgccagtgacctcgtcagcctcggtgcctccatctgcacctgcatcgggtcctggtacggtttgagcaagcccacgtagaaggcggggtgcggccgcatcttgttcggaagattgagcgtgtacgcaaggcccttcttggccacaaccttgaaaggtccgatgaagcgcgggcgcaacttcgtcttgaagacggctgacactgcatgtgtaggtaggttcttagcgttaaccagcaccaggtccccgacctcataactttcaacattgcctctgcctctggcatctgcatgttccgtttgcttgtcttggctctcagccatcgcgtcacgcgcatgtcgtaagacactcagacgcgtcgacaagaaagcgtcaacctgtttacgaacagtagccgggctgacatcggctagccgaccagctaaattggcttctcctcccccaccaagcccgaagccaccacgtgacggcgtcagcgggacgcggggatgagacaagctgttcacgtagaacggtgtgtagcctgtcgaggcctgcacggcgttgttcaacgcaaactcaacgagtggcaacatggcactccaacgcttcggcgtctcggcgcaaatgctgcggagcacgccctcgacgacgcgattcacgcgctctgtctgaccatcggtctgcagatggtcagccgtggacatgtccagcttggtgccaagcaccgcgaagaccgcgctccagaagttgcctgtgaagcggggggttcggtccgagacaatcgactcagggagtccgtgttgtcgaaacactcggtccaagaacagcgttgctgtacctttaccatcgatggtgtccggcacagccgcaatgtgagccatcttgctcagtcggtccacgaagaccacgactccggtgttgcccgccgcgtccaccggcaggcaaaacaaaaagtccatactcatggattgccaacagcccgaagggacaggcaaactcgccaacggcgctgcagcatgaggtgacgacttcacgcgctgacacgtcttgcacgtgcgcacataagtgctcgtccacttctacagctttggccaccagtagtgggtactcaccgagctgtaggtcttctcacggccaagatggccggccagcggcgtgtcatgtgcctcatagaggatgcggtacttcagatcctcatcatgagggatgaccacgcggggcgtatcctcggggccagtgttgtagagtaacaggccaccatcgagggaataacggtgtagccgcgcgcgcagccgcgctgacaattccatgtccgagtcttgaaactccttgctacccagagccttcagcaacgcgacacaggtgtcgtccttggcataagccgtttggatcaaatccggtaatgacgaaatcatggtcgttacatgagccagctcataatccggcctgcgcgacagtgcgtccgcaaggacattctgcctgccaggcttgtacttcacctcgaagttgtactccgcgaagaaggacagccagcgggccatcctttgcgagagatgaggcgcctgagtcgcagtgcgtaacgacgcatgatccgtgtaaatcacgaacggctgagagcccaacaggtgcaccctgaacttgacgagcgcatacttcattgcaagtagctccttgtcgtggacaggataggtcttcaccacagccatcagctggcgagattcgaacgccaccacgcgctcgcgcccctcggcgtctgcttgcagcagggcacagccgatggcaaagtccgaggcgtcacaggcgacactaaacggacgagcggggtctggcaaagccagaataggcgcataaaggagactgtccttaattgccgcaaacgcatcttgatgctcggtgtcccaacaccactccgcatccttcttcaggagattggagagtggccgagccatctcagcgtagttctcgctgtacttgtgcaagtaattggccaagccaagctacttgcgaagatccttctggctcttgggaaccggccagtcaacaatgaccttgaccttgaccgggtcggccctcaggccacgcttcccgatgaagcaccctaagaaggggatctcttccgctccgaagaatttgtcaatgttggcatacaacttgttttgacgcatgcattcgagcacagcacgcaggtgctccacatggttctccatatcagtctttccgtgctcagcacgactgtggacaaagatgtcatcgaagtacgtttgcgcgtacgcccgatggggcctgaagagctgtgtcacaagacgattaaacgtcgctggcgcgatcgaaagcccttggggcatcaccaaccactcccagagcatgccgctccgagtactcaccgcagtgagaggaatgtcgctcgtcctcatgagcaattggtaatatccatcgaccaagtcgagcgcactgtacatcgtacatcctgtcatgttgttttgaagaacatccttccgaggaatcggcgtctgcgccggaatggtagcggcattcagcttcttgaaagcatgcacgatacgccacttgccgttcggctttctgacacagaacgtcggcgtagagtgtggagacttactctcacgcaccatgcccgcctcgtgcttcgcacggaagaacgcgtcaatgacgtcacactgctccttcggcaagggccactgcctcgcctcgtcacgcagtacttcgctctcggaacgagatcgatttcgtgtcgaacacctcgatccggaggtagccccgagggcgtctccttcgagaccacgtcctggtaatcctttaccacttgatacaagggatccgacgggttcttcaggatcgccgatccgctccgcgcattcagcgtatttttagtgtcttccaggacagctttatccagaagcgagggcgagttcaactcttcttcgggtcgtatgaccactacctcagccaagtctccagccttcaaggcttcgccgaactcggccaaggacagctcgtccagctccaggagagcagacagtgagggcaagtcgtcgaggttgatacctccgtcgacgtcgcccgtcactccattcacgagtgtatagagctgctcgctctcgcgtgaagcctcaccgctcgacccgcccttctcgactcgtgagatcgctgacgccttgcgtctcgcagccagcgctttgcggcgctgcctcctcttcatggacaccgtccgccctgaagagctccgtgatttcgcgtgcatcttgacgccaggtgtcgccacctcgtggagctccaggggagctccagtgtctttaccgacactcagcgaagctgcacgatccgcagcctccactcagtagattacgtgccaccccacgatcttcatctgggcaaagccccttgttcttctgcatcgtgccgaccgcgccgtcgctggcacgcagcagggcgtcgccctcagacgcacgcccgctcagcggaattagtgccgctccacctgccgtccgcgagccacgctcggaacgctcgttctcgacacactcagtgtccaccaactcggaaactccgatgtccagcatattgaccgactcggtccagtgctcgcgccagaagcgcttctgcttcctagcagaggtgggttcatgactcgccaatgctcctccaggagagaagtgcgtagcaccaagggtcttcgacctccaatcgatccaaggctcgtggcgttccaggcacgccataccaaggatgagatcatacctcgaatcgaggtctaagaccagacagcgttccacgccatcaacatccaaaaacttcacgcccaggtccacaggaaccttaggcaccgtgacacgagtgcccgtcgcgagacgaacagtgacgatgtcactcccacgcgctaccagcgcctcagcataaggctgacttccgtccatcgtagaacgccgggcgtagttacccgacgccccgaatcgatcaaaatcgtccatggcttcgtgaagcccttcacccaagcttggacaactagcaagcccggcttgcatacacgttccgtgttagagagtacggctctcttcggggctaagtcctgtcgacctccacctcgccgaggctcaatagaacttagttcttccccagtagaccgccccgcgcctactgggacttctcgtttccccaagaggaaccagagccctggctcgaacccgaagagcggcttgacgaagcctggcgctgatggagcagtgaacacccagcacgaaggtgacgggtgtcgccacagatgaagcaacggctcataccgcgatgctgctcatcagcacgaagctcggcttcttcgtcttcagcatagctgaggttcatgggttccggaccactctaggcgctagcgtaagacgcattccacccaagtctcgacgacctaaaattgtgtcccgcattcaatgtgacgctcacagcctcatcaaaagagctcgggtgggttcggaacacctccgtcctggcaacgccagtgcggaggtcctctatgaacaccgtaacgatgactgcttccggcagggggtccgcagacatgccagcaatgagagttctcaactcttggatatagcccatcaactccttcttgctctgcctggtcgccaggaagcgtgagcgcacgcgatacgcctcgttaggcggagcaaacactcgggacaattgctgtttcagctggtcccacgtcgggaaggccacctcgaccgacgtcccgaatgctagtgcccactccctcgctcgcccaccgagcttcgagatagctagtgccacgcgctgcgactccgtccggagtagagctgagctcatagccatcttaacctcacgggtccaaagcatcaagctttcaccctcctcgccttcgaaggtcttcacgattaacatgagcggcttgggtcttgttgctgcgtcggatgacgaagcgggcgcttggggcgccgcggccgttgccatcctctgctggaggtactctagcagagcattttcgtagcttgtaaacgcctcgagacgcgcgttcaccgcgtcggggcctggctgcgcaagttgcgtcacgccctccgggcccagcaaggacataagcttttaaagcgcatcctgctggttcgggggcaagtgagcgaactgctccattctccacagagggtcagtctatacatactctggtgtcggattgactacaagtgctaccaagtgcagcgggactgccgtagcattagcgtcagaggaagacgtaacagacccacagagtctcagcttaagatagtccgttctaataccagaacgtacgagtccgtacaccttacggactccaagagtcaacccttaactcttaactgtgtgaatctcaaactgaatctatttctctttagcgcgaccaagccgcctacggtgtaaatgtatccggttcactatctagcatagtgaaccctagtcatatacataatcagtggctctgaagccatgtactgattctcctactgatttaggctaaacagtgtgtacccacttcgtaacccttcgggtaactctcgtgtaaccccgttacagtgtacgtgtgctatatccagatgtagtgcgttatttagggatgggacgccatttttcatattttctcatcttggtcgatcggcaatcggcgatccacgatccgccgtgctggatcggcgatctgtccacttcggtcttccgccgtcccaaatctacgatatcgcgcgtaacgcttttcgccttcgagacgcgctcttcgaacgaggtaccaccattctccatgtgtcaatcagctgtgatctacctcgtaccacactccgcctacgcgcgagcattatccagatgcctcgatcgctcgtcgaaccttcttgatctacacaatcccagtcttattcacgtcgcccttctctcgatcgtcgatctccttgattttcggtcgatcggttatgccgcgtttctcagagaacaaatcttgttctcgcgcttctccacacgaccgcacgtcgatcgtcctctccgccaattggcaccctccgttcatgcagctcgcacgtctgcctctcgtcaatgttcccgcaacgcatccaccgcgaacttgctctctgcccgccgcgctcgtcttactcgtcgggctcgtcgcgctcggccaacgcgacgcgcccgtcaaactcgttgcgcccgtcaaactcgctactcgtcgcactggtcgcacctactgtgtgcgtcacgctccttgcgcccgccacaaccatcgcgcccggcgcgtccatctcgaaaatctgcctgcaaaaggcctgtccgccgatccccactgttacattgtgttcatttagatctctaggtactaacgatcatcaatatccggagctaacacacatacacgttgttagctgaaaggtgtgaatcatatcatgagcgtgtgtgcgatagtacctcagaagatgttggcagcgcgtcacactgcacgaggacacacaggtacctctccctttagtcatgatcgacaaatgtgtgggtggctgggacgctccagtggcggcgatggtgctaacacgagcgttgtgtttgatcaggaggtgatcgaacaccgagcgacacgaaccaagtcaacatcaagggcgtggtatgggtcagtatgtggggttattcgtttgtttgtgttcggataggtgtctaggtggtttgattccgcgctcactgacatgaagtagggccaccacaaagattcttgaaatcacagctatggaaagttcgtgtcaacatgccacgcaaggaaaaatctcaagtcttcagtataacggttgttatcggacaggcagcaaagcagcataagatatggccttgcggatagctggatagcaaaaagcaatagccctaagaaggcatttggaacttcagtatggaattacttttttacgcagaggcgcggtgggaatatatattgggacaaaaaaactacaataagataccaggcccagcagtatacagtgaaacacagaacagcaaacacaagaccacatactaagtataccactgtaaaatacaaattaactgcaaatgaaataccacaaaataatagcaattatcatgaaataaaagcaaaaatctaatctagcaatacaacaaaatagaatccaatcgaagcggtgtgtcgccccggcgcgctgttaggcgactacgtctctcccatggacccgggtaagctgttctgtatgtggtgacaaaaggatgccggtacatgtataccggtgtcgaaaacgcggtgcaggagtaccctcagcttgtttaggcgcagtgcatcatactaagtgcgcccaacaactctactacatgtatggactacaacgagactgtatccttgtgcggacacgtaatctcttcgagatgctctcaagtctcgataaaatggccgcgagtcaagtacttctgtaaagcgatactcttgacacaagttttgagcagcttcactattcttcagtacatttatattactgaattagcactccaccaatcagatgaatgaatagattattatcgaccaatcagatgccgaggctgcacgaatagcgccaagtccacgaaaactcccgcgaaatgagcgtgctagaagcggcggcgtctccgagcagcagcggtgcgtggcgggacccgccggtggagctagacagcgtctcattccttgttgttcgtgcgcagactcgtcgcccgtgctggtggaggccccggatcgccagcgagtgcgcgcccggcccgtggacaccgaggaagaggaggaggaggtacgatacctacctacctagtggagatggatgggtccggaccatgggacccacaggcaaattgctgttggttgtgtgtctgggtgtgaagcagtcggagggcggcgacacggacgagctggaggaggaggagaacagggaggacgacgagcagcagcagcaagaggacgaggagatggacgaagatgacgctcaggaggacgacgccgaagtagaagaagtagtagaagaaaaagaggaggaggaggaggaggaggaagaagaagaagaggaggaggagacgacgaagaagggcaagaagagcaagaagagcaagaagagacctgtcaggcgcccctcggtacaatgccgcgtctccacactccggcgtgcattatgcagagtcatctgacggtcgtgtgtttgtgtgcggttggtttcttttcgacagcgccgactgcagacagagctggacatcgccagcccgcagccctccacgggtcgcgaagacgtcagcagcgcgtcgccgtcgtcgtcctcgcgctactcgctgcgcacgcggcacagcaaacccaagcgcttcgacgagtccgtgtacaacgacgtcttcgccagctcacactcgcgcgcggattccgacgccgagtcgacgcccgaatccgctgtcagcaacaacaagaagcgccggcgtcggcgtagtcgcagccggcggtccaagcggcaacgtcgagatgagggcggggaggaggaggagggagacgacgacgacgaagatgaagacaatggtgacgagcaccagcaagcgaacgagtacgtggaccgcttgaacatgcgcgagatcaaccggcggatcaaggcacagcagcgcgaggagcaagagaaagagagacgctcgcgcgcgacgcgatactcgctgcggtcacgagagagtctcacgacaagcgagacaagcgtcatatcgcctccgcagagtgagaccaggacccgctcgacagggaaacgatcacagctcgaagtgagcgcagaggatgatcatgccgaggccggacaagacgaagatgccgacaaagagtcccagtcagagaatgaagcgaactcggatgagcaggaggatgaggacggcgaagcaggaccagcaagttcgactcgttaccagctgcgagagcgtcgtcaagctgcttcaagcaactctatgaccactcgaagccgagcgaagcccagcgctacacctgtgttcgacactgaggacaattcacgacgctattctctgcgcgatcgctccaaaacccaccgtacggatgcagaggaagatgcgggcgcgtctccagagacttcagcgtacgcggagtattacaaacgacaggccaatcgcgcctctaggagaagtgctacgaacggctctacgagcaaccgacgattgtttttgccggacatggatacctcgccccctccccgctgccgccggagccgaggccgaagccgagcgcacaggaatcgtcgccgtcgctccctctcgtcttcttcttcaggatcgtcatcgtccgacatgtacatggacgacgacgactcggacggaggtatgcgaacgagtagcccgtggcgatcgtccaaaggttctcggaaaggtgcaagttcacgcgctgatataacgcctgtggaagtggatcgcagcataacgtgggagagtgtgggtggcctcaagtcgcacattgaggctctgaaggaaatggtgatgctgcccctcctgtacccggaattttacgacaagtacaaggtctctccaccgtcgggtgtgctgttctatggccccccaggcacaggcaaaacgttgctagctagagctttggcgaactcgtgctccgtgtatgatgaaggcgagcaagctagtgaatcaaaaggatcttcgagcccagctcagcatggtggatcgaagaagaaggggagaccaagacggcacgtcacgttctatatgaggaaaggagcggattgtctgagcaagtgggtgggagaagcagagcggcagctacgcctattgtttgaggaggcgaagcgtaaccagccctcgatcatcttcttcgatgagattgatggtctcgcaccggtgcgtagcgccaaacaagaccaaatccacgcatcgattgtgtcgactttgctggccttgatggatggtatggattctcgtggacgcgtcgtcgttattggggcgaccaaccgactggatgcgattgaccctgcgttgcgtcgacctggccggttcgaccgagagctaggcttcaagttaccaaacgtgaacgagcggaaaagtatgctggcgatccactcgaagcattggaagcccccactgtcggacagattccttacggaccttgccgaacaaacagtgggctactgtggtgccgacatcaaagcactttgcgccgaggcggccttgtgctctctgcggcgcgtgtatccgcaagtgtatgcgagtcaagataaactgctgattaatctggacaaggtggttgtagctcgcagtgacttcatgaaggcagcgaagaaaatcaccccagcttcgcaccgagctgtgagctcgtttgcgtcgccattgccccgcgccgtgaaagggttactggaggggcagctcaaaacgatcttgcgcgatgtggcgaatcacttcccgctattccctctcgacaaagccgcaattgatgatgcagtcacctccactgacgaagtaaaaggcgaattgcgtgccgacgaggacgaaaacgaagacgaggacgagggcgaggatatttatgccgttgcgaaccacgatgattgcgacgtttgctacggagatgaaggcgagttgctttgctgcgacgcgtgtcctggtgctttccatcgtgcgtgtctttcggattcggccacggctcaggagtctactgaggtcaccaccagtggcctttggttctgctcggattgccagagctccaacgcggctgtcgtgcaaaaggcactaaaccgagcgcaaaagaagcgcgtccactcgatcgcttctcttcatataccacgccactcagggttccctcgcgtcttggttgcgggcaaggctggcatggggcagcagtacattggcccagcactgctgcacacgttggagggacttacgcacttctccctcgactatccgtcgcttgttgccgattcgaactcgcacgccccggaagaagctctgatccagagactcactgaggcgcagaagtgtctgccgtgtgtgctttacctcccacagatcgagctgtggtggaggaacacgaccgagtcgatgcacctgacgctgaagatgatgctgatgaacctgcaagtccgggccaacctgccgattctgttcttggcatgcacggcgtcgtcctcgatcgatgatcagaatttaccggaggatctgctggcattgttcaaggaggaccccagcgtgtcccgaacgtctgttgtgatggagctggattcaccgagcaaggccgctcggttggtccacttcgagcaagttttttgctctttcgctacgcctccttcggtgcagaagaccaagcgtaacaagaatgagcagctggaggtgttgccgctcgccccgcttcctcctgcgccgtcgttcattgacctgagtccggaagagcagcagaagagaaaggagcgagaccttcactttctgcgtgagctgcgcattttcctgagtcaggtgctggactactgctattcgcagaggccatacacgccgttctacgttccggtggacccagccgccgtgccgaactactatttgattgtgaagcgcccgatggacttgagtacgatgcgggacaaactgaacgacgaagagtacacgtgcttcgagcagttcatggacgacgtccagctcatcgtgcggaacgccaatgtgttcaaccccaagcgcagcaggacgcgtcatattgcgcacgcagctggcaccatgaaggacaatatcctgtcgtatgcgcaccgattccgcatccgccagggctacgacctgttcgccaagtgccgtgaagtaaccaagcgactacgagcccacccaagtttgtatggggagtacggccagcgattcttaaactctgctgggaagaccacccgcaagaatcagactcgagcccacgagaagcccggcgtgcgcaccagcgcgcggctccgtggtgtaaaagctcccgagatcagcttggatgcagccatttcgcgcgcgaccgccaacggcggcagccacaagatgaccagcaatagggtgactgtgaagaaggagcctgcgacggaagtggaggatccaagcggcagcaaggaagcggcagaaggtgacaagcaggtgacccagtggtttgacgaggaagaagggaagagtgaagaagaggaaccgtccaacactgacagcggcgagaaggctgacgagagaaccatcgaggaggccgatgatagcgaagacgaggtgtttgacgagggcgatcgtgtctttgtaagcagtcggacgcatccgggaatgaatcgaccgggcggagctggcgtcgtgcagggtcgcaataaggacggcacgtacaacgtcaagtacattctcggcggtactgagaagaacgtgagcgtgaagtacatcaagcgcttgacggacgacgcagtgatggagtcggtgaagacgcagcgggatgtatccaacagctcggcggaggcggcaggcgccgtgcgcttgatccacgcggaggagaagatggacgagacggactacttcgatgagctcttgtggcccctcttgaaggaggaaggctggacgcgcgacgacaacttcgatatcatcgaagcttcgggcaaggagtccgggctggccgtgcagcgcgtcgtgttcaagccgaacaagaagcgcaacggcgagactatgactttgaacagcgtgatggaggccttggagtatgtcaaccaggagcccgagctggcgaaaaagtgcttcggcaaccggtacgcggaaggcatgttgacggatcaagcgcttggtggggacagcagcgacgacgagaccgtcgaggcggaggagggcagcggcgtcacgacggacgagaaggcctcggcaccgcagagcgaagttgctgacgagcagatgcctgaggcgcgcgacgaagaggaagaggagaaagtggctgaggatgtggaggacacaccggactttatttatgacgaggtacgggcggcggcgtgcttgctcttgtgttggttggaatgctgatgtgcttacggtgtggtgtggcttgtgtgtttgctgcaggcccgaatggaggcggtcttgaagaagctggtggcgaagacggcgggctggtcggtcgacaagctgcgcgacgagctgctgcagctgaacaagctggcgtacccgttccgcaaccgcttcgaccgggccgacctgatgatggtgcgtctatggagtgtcgagtgccatgtctgtgaagagtgtccttgtactgaccgtgtcgaattggcgtgtgcaggttatagaggcgcgagtgatgatgatgcagtgatggatagctataacggcaaatacacgcatagacttcatcccctagtgtgccattagcaacttgcttcaactggactcgagtgaacccatctacagtagaatggcagatcagcttgaccatctttcccgtgtaggtacgatataacccatactttattcaaacttgaacgcttatcgagcacaagagcgcgatctctggagcattctccccttcaaggtccaattatcatattcgcgtgtccccagtctatagtctccagccagggtcgccatgccgatcgtgtacgcgctcgtgtcgcgcgagaagacggtgctggccgagtacacggccacgtcgggcaacttccccacggtgacgcgcgtgctgctggccaagatcccgacggcggacggccgcatgtcgtacgtctacgaccggcacatcttccactacatcgtcgagggcggcgtgacgtacctgtgcatggccgacgacgatctcaagcggcgcgtgcccttcctcttcctcgaggacatgaagagccgcttccaggccgcgtacggcgagcgcgcgctcacggccatcgccttcgccatgaacgaccagttccagcacgagatccggcgcctgctcgactactacaacgccaacccggacgcggactcgctctcgcgggtcaagcagcagatcgacgacgtcaaggacatcatggtggagaacatcgagaaggtgctggaccgcggcgagaagttcgagctgctcgtggaccgcacggacaagctcaaccgccagtcggtcaagttcgagcgctcgtccacgcagctgcgcaagtccatgtggagacgcaacgtcaagctctggctgctgctggtgctcgtcgggctcttcgtcatctacctcgtcatctccatggcctgcggcttcgacttcagcggctgctccggcaagcgcgacgacgacgagtgagaaatccccacgctcgggtcatggatggaaaagtaaaacaagtttttgcatatcgttcctcttgtcgacaactttcacgtcgactcactgcaatttgtgtttgtttgcgcaaaggttagtggtctatctattcatctactttctatctgtgtgggcttgtatgtctgtggctttagcctgctggcccctacgacgcagtccagcgcatggtcaaagttcgtctcggaggaattgcgcacgccgtggtgccagtggctctcgacgttggcgtgcagtgccgccgtgatggctttgtagatgacctcgtctcgccccaagaagtgcacgagcacgaactggcagccggtgaaggccagcgcctccttggccacgtcgacgtttggactctgaagggtgcgcgccagacgcgtgaaaatgcggcgctgcagcacctccgtcgggtcaacttggtggagcggcggcccggacataataactcgcgccaccatgcggaccgcacccacctcctgcttcgggtaccgagtcggccacgcactcagcaatcgcttcagcaatggaccagtcactgacggcatgtacgccacgaattggccggcacaactgatgagctcttcgtcgtcggacccagcggggtcgacccaatgcgcacgccagagcgaaacgaggctggtcaggcagttgcgtacaagttccttctgctgctcctcctgttcctgcgctgcatccgatccgtccggtggagtcgccagcaagctttcttcgacatgctcaatcgagtagcgcagcagctcggtgaagccgtgtccgtggtcgtgctggtgatcggtgatcacttgcgacgagctcttttcgacgcctaggctctgtgctcgggctgcaaccgcagtgacgtactcgacgcgaagagcagtggcgtcggcgagtgctcgtgcgagatgcaacctcttggtggggcagctcttgtggatggcgcgcaggatgtcgagtcgcgcgctggctgtgcggaagtcctcgaagcgcaacgcgttcaccagcgcgtgcatgaacgttggggtgatgaggctgtctgctgccgccgccggagacacggcagtcggaagtgacgacggcgcgtgcaggttgatctggtccttgaagagcgcgttggcgagtccccgcttgacgaactcctcgttgggctcgtccgtgtctgttcctgtgtcgtctccgaacgcgctgagggcttgtcgcgggcggttgcgccgtccttcactgcgcgcgaacagcgccttgaagatggtgtcgatgacgtcgtcgcgactggccactcgctgcggcagacgcttctgctggctgaagagcgtgagctgctgcgggaaggcgctccctgccgtctcggggtacacgtcctccgcatcctgctgacctgtcgaggctgctgtcgtctccgtctcctgctcgctcgttgtgtcctgtgtttgcagctccgtcgacgtgagcgacagcttgcgcctgtgtcgctcgtgcagcgacgctgctgcggccttggccgacggctgcgcctggccctgtttgttgaggcccttggtccccatgcgctgacgtctgggcttgggctgtgctgttccattgccactacgagccgtagatctgctagtcgtagtagtctgctgctgctgctgggtcttcttggcggccgcctcgatgttctggtgcagcttggcagctgccgccgcggtggccgagcgccgcggctttcgagacgcagaggccgcagtcgtcgaggtcgcaggtccacgccgatccgtcacgaacgccatcgagcgcttgggcgtggtaggcgccgaggccggagcttgggcggcgcgttgcgcagctggcacgaacacgggcgccgacagcgaaagactcgcgcggccgaagcgctgctccagctcgtcctcatccaggctgcgctcgcggtcgcgctggcggcgcacgcggctggcgcgcagcttggagccgccgccacgcgccttggcgacgagctctccagagttggcacgacgcatggtccactgatggctgcgtcgccggacaagtcgccctcaagttgcaacccggtctggcaaccagcaacctactttgtgcgccacaccaatcagaacattcgagatgaaattatcggatgcaaatttactaaaatcaggctggttgtgtaccttaattcagtgaatcgttatccatacttctgttaaagtagcttaccttttcagcctcagtactttgttttcaaggccaacttttgtggtggcgctcggacgctgcaatgccctgaacattgagtgcggaggcgaagtggaggtggagcaaaattcgccaaagaaggccgagcgtgccagggcgctctaggaaatagaagcctccaacaatgtggttttgctgacaagagatgcccttcaggagttatgcaacgagtttgatcctgctaaacaacccgcttgccagttctcccttgacgacgcagtatgcagcgcatttgccttctctgcggttgttcaagcttgtcatctacaaacttggccctgcaaagtctaacacaggcattggtctcgccacgatttgccgcgttgctgaagcgacgcaaccgtcattcatggagctgcactacgagggtcgagcgcagggcgcgccgctagagttctcgccgaagcaccgccagcatacgctggtgctgcgcaattcgtcgatttccagcaccgccgtgctcttcaaagtgcaatgcacggcgccgcgcaggttccgcgtgcggccggcactcggcctcctcattgcctcaggtgatactgtcaatatccaagtccagttgcgctcgcaggttcgtctccctggctgccgctgttgcgtgcatcgcatccttatttacgcgaactgtgtaggaatgcacgccggcttcgtgcatgctcttggtcgtgggccgttccgtcgtagacgccccattcactcgggccccatcggatgcggagcagctcaaggccatgtgggctgcagcagaagcatcggacagcttggtgatctcagagatgatcaacatccggatccaagtctcctcagtcgtgacagcagatcatgacaaagcgatggcgttacctgtacagcgcacgacgacgcaggttgccgagctggtgctgctgatgatgaagagccaaagcagccgacaagaaaacgcgctgacggacagtgagcgcgagatgctgctgactgctcgagcatcgcacccatcggactggccttgctgggaagagtacgccgcccggatgaggaagctgctgcgagagcgcaacaaacgcaaggcacgttgaatcaatcgaagataaccaaacgttttccattaactttgccattaaataagaggtactgccttcgtatcactccgaagacgtgttactgctcctgacgctgcttttcgatcgcctcgggcgatctatgcctgcacgaggtccaccacatgtcgcgagagcactctttcagcctcgaactcgtcctcttcgccctcggatgggatatcgatcatcgggatgacttcctcgccgtcaaagaactcgtcgtcgtcgtccagcgtcacaaacgcctccgtatcgatgaagctgtcgtcttcgatccggccgtatgacttggcctcggggcgtgcatcacttgggtgctcgtcttcttcttcgtcctcttccagatccatgggatcgatcgaggtgaggcgcgggtgcaggtggtccgtcgggagccagacgacagactgaggtgctgaatgcatcatggggccatccgacgacatggtaccgcggcctccttcgtcaatgcgcgacatcctgccgttccaggacgacgaactcaagccaaattgagactttgcgccatgttcctccacttgcagactgattcgctcactcatgcgcatccgcgtggtggcgccagtgagctcctgggacgccacccagccagcgttcaaacggctcgtggagaccatgcactcggagcaaaagtccatcttctgcgggtggaacacgccactctcgaacacgaacaccttcttgttcaccttgcagtggttgcacacgggctcttcacacaactcgcagcgcgtcactttcccaccgaagaaaggtcgcacggggcggtggcacactcgacaagggttcacgcctgcacccgcgccgccgaaggacacactgctgcggctgctgtcaaacgtcatcgagccgcggaacatgctgctggtgaagttgctcttgcgtccgccctgcgtctggcggacgtcgtcgtctacgtggtgcaatggcggcgaaggcggacgcagagctgctggctgcttggtccgcagcgagaaggccagcttcttcatcatggcgcactcgaccgtactgggcgaggccagcacggcctctgctgtgagcgagaaggccagtcggtcccttgcgccgccgcggggcagcatcccgccgtggaagaagagctcgacttcgttctcgctgtgttgtcggtagaggtagcagtacgacaagtggccgcgcacgatctgcatctccggcgccagctcgggcgcggacggcagcgtcaccgagtgcacgaggtggtagcccacgcgcgcgccgctgtcctgcgggtcgcgcagcacgccggtggcctccaggtacacgtagtctctatggcgggacagcacttcatggtgccgcagcgcccacttgagcgtgagcgatcggaacggcgcgctggctgacggagccacgagcgcggccagcacgcggctgtccagcaggtcgcactgggcgtgggcgctctcgatctgcatggcctcgggcgtgaggttcacggtgccgtgcagcacgtcctcgagcgtgccgggcacggtcccgatggccagcagctcggcctggtccgagagggccacggacggcgcgctcttgccggcgctcatggtcatgcgcatggcgtcgtctgcgtgctgctgctgctgcttgtgcttggcgcgtatcctcaggccgccgaacgggccgcgcgccgagaccttcttgtagcaggcgatggcgtcgtggcggccgccgcctttggccagcttccactgcgagcggtccacgccggccgagcctccgggcgcgtacgaggcggccgcgcggttgctgtggtacctgtgcagcgtctcgtggacgcgcgcgtcggcgaactgctgcgcgcgggccacgtactccttggacgtctgcagcgagggccgcgagttgggcgtgtcgcgccccacgccgccgccgctcgccgacgacagcgagcgctgccggtgcaggggcttcgtcatgggcccggggaacggaaagcgcgtctgggtcctagctctggtgggctctgggtgggctccgaaggctctgaaggataaggatgtaaaaaccgcctgcaactattgtacgaaaaccgtatatttatacttggattttgtatgttgacaatttgacgcaacactgggatcggagaccacagcggactgacgcgttgactgcgttgacctcctcggtactgtatgccgccggtgtggcaggcaagtgcgctggcggcaggcaggaaggcctgcttgccgccatggaccctgcacaagtcgtggcccccaaagatggcttcgctctgtaggtggactcactcgcgccgatagagacgagctccgcgctcgactttcttgccgcccttggcccgtccacagcgttttcgatgaggatgttcaacgcttgcaacgcgtgcgtgcccgcagtaatgcatggaggcaaatcgagtggtgaaatcgccgccgtccgagctccatggatgaaatggcgaggaaacgcgcagcaggaaattcggttgctcacaagctcgtgcgacgaaaatccaggcagagcagctcagagctaccgaggctcgcctgcagaagcgatgatgtagctaaggtggaggctcaagccgaacaaataactccaggaatcgcaagcgcaaaccaaggtaacagacaacagaccgagctcaaaattgcattgctatccacggaagtctacgcaaaaactggaggcgagctacgcgctgttgatcatgtgcgcaatcgcttcggcgcggaacacgtccgtctcaatgtaggcgaggtccgtcacgttggcgtcgaacacgatgttctgcgggtcgtccagcgagtactgtggccattggacgtcggtcacgccgttgttgttgggcgtcaggtccacgatgaagctggcccacatgcgggtcatcactttggcgagctgcttgaagctgtcgggcttgcccaggaacgggtccgtggccaccgagttgttgtagccgtctccgagcaagttgtagaagacgaacgcgacctcctggaagtgcgtcgagccgagatactgcgagatgccagcgggcagcacgttgaagaggtagctgtagctggtgatgttgttgcgcgcccacacctgcgacataaagcggcgtggggcgtgcatggtgctgtctccggcgtaggccgacacccgcttgtacatggcgccgtaggtagagctcaccgcaggacggccgtggagagtgccgggaatgccgatctcggggatgtccgggtacatttcgagcaggaggttcgcttcgtcctggccgtagcctttcgtcttcaccagatactcgacgaactcgtcggtcgtgtcgatgcccgtcttgccgaacgccgttccttcgtcgttgttggtgccgagaagtatcggcacgcggacgaactttccttcgctcagcagggcggggccggtgtcctggatgtagtcgccgtcaaccgccgggccccatgacgctgaggaggccaccgagctgttcagaatggctgacagcgtctccacgggcacttggcgaagacagtctagcgtgccagctgcagcgctgcagtttgctgccgcggtgatgttgttgtagtagacgtcccaatcggacgcgttcgtgtacgccccagggatgtacttgacaggcgatcccgactgcatcacagcaccgcggaacagcccatcgtcacgaccgccataggcgatgagttggtacgagactcctcggcctcctgcgctctcgccccagatcgtgactttgcttgtgtcaccaccgaatgcggcgatgttctcctgtacccagtgcagcgccaagcgctggtcccggaagcccaagttcgtcacgccagcctctttgaccgcagtgccccacaagaagccgaaggcctggagacgatagttgaagctaactccgatgaacggcatgcccgcttccgcagcctccttcacaatgtacgacaagttgtagcgagggtcgcgcgagccaccttcgtagaatcccccaccatgaatccacacaccgacaggtagatcatccccctccgagacgttgctggggcgaacgacattgatcgtcaaacagtcttccgagatcacgttgcccaacacccactggtcgctgccgtagccgtagcactcgggggaatacgcggtcgcgttcttggcatccgtccacgtcgtattgagagactgcgggacgcggaagcggaggtctccgatagggggctgtgcgtagggcatgccgaggaagaggtcttggttgtaggtttcctggtagacgccgtagtaggacccgttcttgatgttgacggtgggtggattgctggcagataccaaggtgaggaggagcgaccccaatgccagcgctcgcatggcttgtcgacggctggaaggctgcgttcgtagttgacttcagattgaggaatgatgagagcaacaaccagatcagcgcgagatcctcatttatccgatcaatgaggatctgttcacggctaacttgatcgtaaacataaactgcaaccacgcgtgttgaagtgcaggcaatcctgatcacatctgtcagaccactgttactgctgctggcagtgcttttttggttagccttagaagttcgagctgcgcttctgccccggacttgctactacgtgtacatccatcagaaggttgttaggagatacccatacattttagctgtcctttgcaaggttgaattgctgaatcgtttgcacagaaatgagaagaccttgatccaacggagcttattagccctggacgttatccaagcaacactaccgctagttggggcgagtttctactcaaagtactgactgtgcaggtacgcgatgccttcggcgcggtagagatcgggctcgatgtaggccagctcggtgacgttcacgtcgaacacgatgttctgccggttgtccacagtgtactcgggccactggagggccgtcacgccgttgttgttgggcgtctggtccacgatgaagctcgcccacgagcgggtcatgagacgcgcgagctgggcgaaggtctcgggctcgttcaggaacgggttgaccgagacggcgttctcgtatccgttgccttggaggttgtagaacacgaacgcgatctcctggaagtgcgtggcgcccacgtactgcgagagtccgttgaccatcacgttgaacacgtagctgtagctcgtcacgttgttcgctgcccacgtttcggctgtgtagcggcgcggagcgtgcatgtaggcatcaccggcataggcacagacacgcttgaactgagatcccaccaaggattcggcagtcggacgaccgtgcagcgtgccggggatgccgatttcggggatgtcagggtagacggcggcgagaatctcagcctcttcagccgtattccccatcaacaccaggtactcgaggaactcgtccgtggagttgatgcccctggttccaaaggccgagccttcgtcgtggttggcgccgtgcaggattggcacgtgcacaaacttgccgtctctcaggagagcagcgccggtgtcctggatgtagtcaccgtcgatgacggggctgaaggaggctgatgaagccacggagctgttgaagatcgacgacagcgtgccgatggggacttcacgaaggcaggccagagtgtccgaagccgagctgcagttggcggcggaggtgatgttgttgtagtagacgtcccaggccgacgcgttcgtgtagctcgacgggccgtgggctggagcgccagactgcatgatagcgccgcggaaaagaccgtcgtcacgaccgccgtaagccagcagttgatagccgacgctccagccgccagcgctctcgccccagatcgtgaccttgtccgggtcgccaccaaaggcggcgatgttttcctggacccagtgcaaggccaaacgttggtccttgaatccgaggttggacacgccttcgtcctcaactgcgctcccccaaaggaagccaaagccttggaggcggtagttgatgctcacaccgatgaatggtttgcccgcttgcgtggcttcgttcatgatgtaagagaagttgtagcgggggtcgcggttgccgccttcaaagaggccgccaccgtggatccaaaaacccacgggcagcttagcgtccgcggagatgccgctaggtcgaacgacattgatcgtcaggcagtcctccgagatcacgttgcctagcacccactggtcgctgccgtagccgtagcactcaggcgagtactcggtcgcgttcttggcgtccgtccacgttgaattgagcggctctgggttgcggaagcggagatttccgacgggtggttgggcgtatggcatgccgagaaagaggtcttggtcgtaggtttcctggtagacgccgtagtaggacccgttcttgatcgtgaccgtgggtggggcgctggcggaggtcgacaccagcaacagcgtagccaccatgagtggaaattgcagagaacgcatctcgaacggagaccagcctaataaactcttggttgagaggtgcgagtgctgctcggcaaattcaagaatgagggagtggggataaaagttcacgcgggtggactcctccttggagggcagtatccaccgaactgcaacgtaaaagtttgaaggaatgagggctagacgcttcagagccgtgctcagaggtgccgagaagagcgttcgcgctgtagaaaacgttatacatgtatccgtgatgaaacacgtgagcccaagcggatcagaagctttggccttgacagcattgcttcgcttgattcattcctgtggctcacttcaacttgatcactgcctcgtcacattttcgcaaagcctgatggcgtgtcgactgaccaaacgcacaaccttcccggtcctagacacttcaacggcaaccacgccacccaaccaacttggttgtaggcccagtcagtgctccacacatactagtagtataaaatgtaggacttgacacctcgaagaggttcctgccatcgatcatcacaaatggatagtgccaatgaagattcacagtaacgttagccatttttattctcaaaactcattccaatggctcatactttagccactcataactaggcggctcgatctcaaccgtttaaatctgcacgtgaccgctgaagacggtgtcctcggcgttcttgctgatgtagaccggacgcccgcccttggccagctcccagctcgtggtgttcacgttgtagaagctcagctgcttctcgcggatgccgatgctcactgtcgtgctggcgccggcctccagctccacgttcgcgaagcccaccagcgcgatggcggcgaactgcgcgtccaggtacgtcgtcgcggcgtcggccggaggcccaatgtacacctgcggcacctcgacgcccttgacgctgccagtgttggtcaccgtgaaggacacgctgaagacggcatcggcgtcgtccgggctgcacgacacctcatagttgagcccgctggagctctgctgctgctgcgcagatcccgacgccgcgaagttggggttgctgtactcgaacgacgtgtagctcagaccgtagccgaacgggaacagcacgctcgtgttcgtgtgcgcgtaccagcggtagccgttgttgaggccctcgctgaaggtggcgttgccgctctccgtgtccacgcgctccgggtagtccgggttgcgcgtcatggtcgagtccaggctcgccgggtacgtcacgggcaggcggccctgcggcacgttgttgcccagcagcaagtcggccgtggcccagccgccctcctggttcgggtacagcatctccagcacagcggccacgtcgtccagccacggcatgagcacgggctccgcgttgttcagcaccacgacggtgttggggttcgcggccgccaccttggtcaccagctcgtccaggccgtcgtccagcgtcagccccgtctcggcggggctgttggcgaacgcgaacacgatgggcgtgtccacctccgtggcgacgtccacggccagctggatgttggccgagcgctgcgtgggggtcacccagctcagacgcacggacgtcggctcgtcgatgagacccacgatgtacgcctccaggtcgtgccagccttcctgctcaagaacgacaacgacacgctgccgctcaaggccggcgcgtccatcgccgtcatcggccccaacggcgtgcagtacacgcacggcaccaacttcgccgagcgcgcgtacggcatcccggagcgccaggtgtcgacgctggaggcgctcaagtctcgactgggcgaggacgtcgcgagcgccgtgggcgtggacggacgaaactgcaccggagcgaaacttcatagctgcgggtgtcacaaaaacttgtttgcggcgataagtgggcaactgttaataaccttgcggaggctcgtccttcgtcttgttgatcctgagcgtgtaactttattttatggtgtatccgacactacaaaaattgccacgctatgtttcgagtcgcattggtacgataattcttggcacggcaaagtgacggcgagagctccacatcttttcgctacgggtgtaacgttggtctcacgtacaatgctcgtatatgcgctgcacgctcttcctcactctcggatggcattttttgacaggcgcctcatcgtcaactgcactctattgatcaagatctcttctctgagcagcgcccaaggtccatgacaaacttccgtgctgaaggtattgctggttgccttgtacagcaagtattcagtgctcactgccaaacaggaaaacgacgatttcacgcagcaaaatcacccaaaatcctgtgcatcaggtattcgttatcaagtgagctatcgagagtacatgggcgaagtcctacccactcgcagctcgagagcgcagtgcatcgacgagtatcgcgtctaacaacttgcggctggcgtcaagttgatgcgcgcgagcagcggccttttctgtggtcatcagtaccaattctcaacagttatctcggagctccatgtttcgaacagaccgtgctgcgctccatgcctttcaggaacttcgcaatgttccaggtgccgaaaactgttaggtgctccttgatctgataaattacctgcagaaccattgatgatatatggtcaggaagtctagcgctattgtgctaatacagacaaccctcgcaggcattcgaagccctgccgccggcgcgcacgagctgcgtgcagagagcgagggcgatgccccacgtgatggagaccatggcgaaggatctatctacccgagctcgcagtgtagtgtgggctgtggggtccgaaggaagttcgcgaatggttgaataaagcggtccttaagaatatgtacctttgagctgcagtgatctagcacatactgtagctgctcggtatcatcgctgtgagtccttgactttgcttggttgctgccagctgaactggtcgattcgtgacattttcgatcacttcaagttgagcgagacttgatttatccatttccgaggctcatcttacctaaattgctgtcagtagctagaggtagccccaaggttgccttgtcacaaggcttgtgtgcgtgaactgtaccacatgtagtgtgccgttctgagagcggccaagttgaagtggtctgataacgtgatgatcccgactagcgaattacgcggcgtaccgtctctgcttgcggtaagccggtaaccagcgcgccaacggcaaccacgcatcagcatgagctcccgatccattgctcgaggtcctgaacgtagagatcgcggccagacttgagctcttgttgtcggcgactatcgtgattttctcgtatacgcgccatcaatgcctactgagcggcgccgctgagtgctgatgcgtgtgctgtagttacactacgtgcacacacgtacgagtacagtacagcaaagtatcacacactgtgattcacactactgcagtcgcgtgcgccggagaacgcatcaaacgtccgctgtaaggttatgcgcgcgtctgcacttgattcagagatgctgtgcagatcgcattcaacaagttcaagtaccggtgccgagcgggaacggttgggtggcactcgaagggaagcaatgtgcattcttcaaagctcccgcacgtgatgaacgctcctggatgagtcaatctatttcttcgaaaccctgcggaccgtcgcttattataatagtttggacgcaggactacttgtcccggtctgctcaagcggcgttgtgcccctcgccgaagcagcattcgtactgtacggaacttcagccgagagatgcacttcagtgtcgaagttacagtacgagatgcactcgatgctacagtactcattctttcgagcgtccctggagtcctggacgactgtaaaaacatgcagatcctgggcttcaaaatttacgatgcagtttggctgcacttcaaccgcgtggttgcagtacatgtagaaccagcgccccagtcatcacatcaactacaagattactcagacgtcatgctcgctcttgctgagtgactctgacgggtacatgtactgtacttcgctgtgctgcagaaggccgctagcgcattgatcggtactgtaacctatctctggtcaaaaacgcgggaagtgcagtcttcatccgccaatttcaactctagcgcctaccacaacatcctctgtggctcgcttgcaatgagaccgctcgcaaacgttctcgccatcggggcgcttctagccgctctggcctccgccagcgacccacccacggtcaacatcaagaacgggtcctactacggcgtctaccaagaaacctacgacgaagacctcttcctcggcatgccatacgcccaaccacccgtcggagacctgcgcttccgcgtcccggagctgctcaacacgacgtggacggatgccaagaacgcgactgagtactcactcgcctgaatgctacggctacggcagcgaccagtgggtactgggcaacgtgatctcggaggactgtttgacgatcaacgtcgtgcgtccgaacggcatctccgagggagccgaacttccggtcgccgtgtggattcacggtggtggcttcaccgagggcggctcgcgcgacccccgttacaaccagtcctacattatcaaggaggccacggacgccggcatgccgttcatcggtgtgagcatcaactaccgtctgcaggcctttggcttcttgtgggggaccgccgtcaaggaggcgggggtatcgaacctcggcctgaaggaccagcaccttgcgctgcactgggtgcaggagaacatcgctgctttcggtggcgacccggacaaggtcacgatatggggcgagagcgctggtgccatgagcgttggctaccagcttctcgcgtacgatggccgcgacgacggcctgtaccgcgctgccatcatggagtcgggcgctcctgccaaggtgccgtccacctacttgaacacgaccgagtgggacacgtactacaacaacatcacggcggcggcgaactgcagctctgcggcggacacgctggcctgcctgcaccaggtgccgatcgacccgctttcatccatctttaacagctctgttgcgtcctcggcgtcgtaccgcccgatcgtcgacggcgacttcctgacggacgtgggcccggcgctccttacggcgggcaagtgcccattctccacggtgtgaacaacgacgaaggctcggcctttggcgctggcggcgctaccgtcaacaccacggaggaatttgtgtccttcctgattgataccatgggagagaccgaggagacggccgccatcctcactgaggtgtacccggacatcccggccgtgggcattcccggcatgctgcacggccgccctgcgaccgactcgggctacggcgtcatgtacaagcgcgctgctgcttacggcggcgacgtgatcatgcacgctcctcgccgctacctgtccgagatctgggctgccaacgacgtcccaagctacagctacgtcttcgacgtgctgacggccggcaacaacgagtacattggcgcaacgcacttcacggaggtcgcgttcgtgttctacaacctgctcggagacggctacaacaactcggtggccacggacccgttcctggacaagcccgacagctacaagcagctcacgaaggtgatgacccgcatgtgggcgagcttcatcgtgcatgagaacccgaacgagaacggcgtgacggcgctcgagtggcctgaatacacgtctgacaacgcgcagaacatcgtgttcgacgccaatgtgatggaattcgcctacattgcgccggacacgtaccgtgctgaaggcatcgcctacttgacgagtctgtacaatgccacggcctagattggtataagtgtttaaagtgtggcatgctgttgagtaaaatgaaagcaacgcgttggttaagcatttagcgtgtcatcaatggtgatgacacgctacatgttacatgtacgcattcttgcttgcggccaggtccagttgagccgttcccttcgacgggaccagctgataatagcctgcagcagtgccctgatgagtggttgccgttcgctattcgctgatgttgaagctgtcgttgtttttgtgtccttggctaccgatggggtggccgaggtcgcatttcgttcatcaagaaattcgttcaaaggacatcagcatgaagcgtacgccaggtcgcctgggaagtaaatcaagtccttgagttttacatgtgagctggtttgtgttttgtttggctaagcgtgcacggcataaacgtgctataaaccccacaggtcatgcttgactcacttcaacttgtccataaaacggcctggaaaggcaacttcaagtatgcattcttgacgagcatggacgtattcataataccctggcacaatgccccctccaaccgttttgctgttggacgagcacaactcacccttgaggcgggaagcccgagcaacagctcattcgcaaacttccttcggaccccacagcccacactacactgcgagctcgggtagatagatccttcgccatggtctccatcacgtggggcatcgccctcgccctctgcacgcagctcgtgcgcgccggcgacccgctcgccaccgtctcctggcgcacgggcaatgacaaggtcgacgccatcgtcgaggccctgaccgccgaggagaaggtctccctcgtgcacggcgccgtcgacgaggacggcaaccagcagcaggccggctacagcgtccccatcacgtcacagggcatccccgccatccgcctcacggacggcgaggccggcatcaacatcgtccagaacgccacggggtcccccacgcagcttaacgtcgcggccacctggtcgctcaacgcggcgtaccagcacggcgtggtcacggggaaagaggccaagctcttcgacttggcggtggcgctgtcgccccgcgtcaacatcctgcgcgaccccgtgacgggcaactactggcagtcgtacagcgaggacccgttcctcaacgctcggctcggcgtgcagggcgtcaagggtctgcaagaccagggctccatggccaacgccaagcagatcgggccgtcgtcgaccggtgctagcgcgggtgacgacaacagcatcgtggacctgcagacgctgcaggagctgtactgggtggcacccggcaccctcctgcaagagggcaacgccgccacgctcatgtgctcgtacgcgcaggtgaacggcatccccgcgtgccagtacgagccgctgttcaacacgatgcgcgacgactacaacagctcggccatcgtcatgagcgactggggcgccacgcactcgacggccgagagcctcatcgccggcatggacctggagatgcccacgggctcgtactacgacgcgctctacgactacatctacgtctcgcagaacctgagcgagtcgtacctgaaccgcgccgtgggccacatcctggccaagtacgacgagttcggactgctgggcaccaccaccgagggctcatcgccgctgccgcaggacgtcgtggaggaccacgccaagatctcgtacgacatcgccgtcaagtcgggtatcctgctcaagaacgacaacgacacgctgccgctcaaggccggcgcgtccatcgccgtcatcggccccaacggcgtgcagtacacgcacggcaccaacttcgccgagcgcgcgtacggcatcccggagcgccaggtgtcgacgctggaggcgctcaagtctcgactgggcgaggacgtcgcgagcgccgtgggcgtggaccaggagggctccatcatcccgtccacgcacttgcgcaacctgcagggcaacccgggtctgagccgcaacgacaccctgggcggcacctcgaacgacgagatcgtctacttcacgggctcctctgcgctggccaagaacgcgtcgtacacgtggcaaggacaagtgcacgcggagacggcgggctactacaccttctcgttcgcgcgcgccatccccaagtgggagaaccacacgaacccggactacggctcgaccttcgccatcggcaccttcagcatcaacggcacggaggtgggcgaaggctaccgactgtacggcgacggaggcgtgaagccctggagcaactcgatcgccacgcgcgacaactgggacaacatcaagtcgtacgtgtacctggaggaaggctggcacgacctggaggcgtacatcgtgggtctcatcgacgagccgacgtccgtgcgtctgagctgggtgacccccacgcagcgctcggccaacatccagctggccgtggacgtcgccacggaggtggacacgcccatcgtgttcgcgttcgccaacagccccgccgagacggggctgacgctggacgacggcctggacgagctggtgaccaaggtggcggccgcgaaccccaacaccgtcgtggtgctgaacaacgcggagcccgtgctcatgccgtggctggacgacgtggccgctgtgctggagatgctgtacccgaaccaggagggcggctgggccacggccgacttgctgctgggcaacaacgtgccgcagggccgcctgcccgtgacgtacccggcgagcctggactcgaccatgacgcgcaacccggactacccggagcgcgtggacacggagagcggcaacgccaccttcagcgagggcctcaacaacggctaccgctggtacgcgcacacgaacacgagcgtgctgttcccgttcggctacggtctgagctacacgtcgttcgagtacagcaaccccaacttcgcggcgtcgggatctgcgcagcagcagcagagctccagcgggctcaactatgaggtgtcgtgcagcccggacgacgccgatgccgtcttcagcgtgtccttcacggtgaccaacactggcagcgtcaagggcgtcgaggtgccgcaggtgtacattgggcctccggccgacgccgcgacgacgtacctggacgcgcagttcgccgccatcgcgctggtgggcttcgcgaacgtggagctggaggccggcgccagcacgacagtgagcatcggcatccgcgagaagcagctgagcttctacaacgtgaacaccacgagctgggagctggccaagggcgggcgtccggtctacatcagcaagaacgccgaggacgccgtcttcagcggtcacgtgcagatttaaacggttgagatcgagccgcctagttatgagtggctaaagtatgagccattggaatgagttttgagaataaaaatggctaacgttactgtgaatcttcattggcactatccatttgtgatgatcgatggcaggaacctcttcgaggtgtcaagtcctacattttatactactagtatgtgtggagcactgactgggcctacaaccaagttggttgggtggcgtggttgccgttgaagtgtctaggaccgggaaggttgtgcgtttggtcagtcgacacgccatcaggctttgcgaaaatgtgacgaggcagtgatcaagttgaagtgagccacaggaatgaatcaagcgtaacaacgctgtcagggccaacgccaaagccttgggctcacgtgtttgatgtcgaccgaatggagttctattacgatttatgttttttttttcgtttcaaggtgagttctaggtggactttattttatggttcgggcctcgttatcctctaaaacttagatataaaccatgatcctcaaataggcgatgctcataccagttgtgtcagcatcatccagagaccatcgagcacatcttgtgggattgctcgcgggcgcaagaagtttgggaaagctggcttccccagtggactgggcactatcttcatcgtgaagagcttactgcactactatcgcatctagcttctcgcacggcaccgaccgcatcagcagtttttctcgctgaagctaccaaaagtattgatgactggggcgtcgaatatgaaaacgcgatgcaaataatctggctaacgtggacatcgtgcactcagtgcatgttgtgatctactcgcaatcgagaaatcttcgatggggtccaagttactatttaagaagccaaacgtagggcatggaattctgccgactttcaagcaaaagccgtcatccgaggaatggcctcatatccacgtacgcaagcacaaggatttcgtgtggcgcaatgctatgctgtattcacagtaatcaatccttccgatcgaccagttgcaatggaagactggtatctcctcctatatggcagatatgttgtgaatggcaagagtaggagaggagcgtgggttttattatgcttgcaacgggacgtgaacacgtgccacactttctggacgtgtgcgggagctactacactctgggatgtgttttatgctccatggacagccctgggggtcggaacaacgggtgccaggatctcgtccacttttcgacatcgactcgagaccgtaccacccggtatctggacgctactggatgccgtgtatcgtcatgagcccgaaggcacgcgtgaagccattcgggggcacatttacaccatactcaacctctgctggcggcttggaggggtgaccacgttgcaagggatttggcggagaaggtgcttatatcgcgacccgagggaggacgcgtcattgaaacgggcggctgccgtcctacatggacgccttcgttccgcatacctaaccgttcggatccactctacgtccacaacggctagtccgcaccaaggggcggctgcacggatttgccatctcgcgctcacttcgccatccccggagacgcagagcctgacgccccgctccgacttcacagcacaccctgctctactttgatggcggggcccgtggaaaccccggccctgctagcgcggggacggtgatcctacaacttggcggcgcaagcctccagcccgccgtcctctggctggccagcgtttcctacgtgtcgaagaccacgaacaacgtcgctgaatatcgcgctctccttaacggcctgcgttatgcggtacggcactcaatggtgggattgcatattgttggcgacagcaatctcatcctaacacaattgcagaagcgacgggtaccaagggctcgtcacttacgagggctttacggacagtgccgggtgctggcggaccgactgatggtgtcttcatggtcacatcacctgcggcacttgaacaaaacagcggacggcctagcaaacattgctatggacaccaaacaaagcaagcaggcgacggcggaagatatctcccgcttaccgccgcagtggacaaccgtactcgagtccctccaagcggacgttgagcactggatggacaccaacccggatcgggagggcattggccgggcctcccctcgcactggcgcaccgtaacacgtgtgcatctgctgccacactttgggcgtaggcagcaccctccaacgatccttaagcgcgggagggccgggcatttcctaggtcgctagttaggctaaatgactgtagtgtacctcaacttaaaacgaaacgaatacgtagattacacttggattcctctcactccccgacttggtagccgcggtatgaaacgcatgccagcatgctttttcgtggagcttagcatcgaatgttgttcgtgtgatcagtgggtcgggcattttttagattgccaggcaagctaaatagctgcaatgcaccctagcttacaacgttttaaaaaaaaacgttgttcgtgtccagccccattacgcagacagattcctagttgtggcggaaacttataatacatctaccgtaaacgagtttttgcaaacagtacatttcgatctgttgccaagacctcaagcttgacttgacctagtgagatttatcgtggccacgcaaagttgttcctgttcctgccgcatcagtcatcgcggacaccgccatgggtcttcaactggggcattcccgcttcaaccacacagcaaatcgtgataatgcggcgacctgcctttcaaatgcagcttggtgctcggtcatcaagtcgattttttctctcgaaaagtctttgagtaaccgtaacgtagtggccaaactgtacgccaagcggtgcgttctacagcactgctgctctcggttgcttcgctctcttagctcaaccgaactgtatgactgccagaatcgttagcccaatgcggtgatcattgtggctcccacctgtctgcttggtacagatggagtcgacaaagaacccgaagtgccgtcaacgcgaacagccggccaacttccagttgattcccaagcacatccctgcggactcaagttgcagttggttagtcgcggcttgtttctgctggggccaccaatcctttgcgacagtgacagcgaggagcacatggggcctccgcagacacaggagagctcgattcactctttgtcttcctcgaacgcgcacaatcgacaccaaggcagtgccatggtatctattctctacccggtggccgccgccgcggcgctgctggccgcaccgatcgccgcctcagaggcgccggccgtcaacatcaagaacgggtcctactacggcgtctaccaagaaacctacgaccaagacctcttccttggtatgccatacgcgcagccccccgtcggaaatctccgcttccgcaacccggagccgctgaacacaacgtggacggaggccaagaatgcgaccgagtactcgcctgagtgctacggctacggcagcgaccagtgggtgctaggcaacgtgatctcggaggactgtttgacgatcaatgttgttcgccccagcaacgtctcggaaggggacaacctgcctgtcggtgtctggatccacggcggtggcctcatccagggcggcgccagtgacccccgctacaacctctcgtacatcgtggaggaggccgtcaacgccggcaaaccgttcatcggagtgagcttcaactaccgcctgcaggcgttcggcttcatgtcgggcactgcggtgcacaaggccggcgtggccaacctcgcgctgaaggaccagcggctggccctgcactgggtgcaggagaacatcgccgcattcggcggcgacgctggcaaggtcaccatttggggcgagagcgccggcgcccgcagcatcggctaccagctgatcgcctacgacggccgtgacgacggcctgttccgcgccgccgtcatgcagtccggcgcctctgcgtactggcccaagagcttcaagaacgcctccgcctgggacgtctactacaacaacatcgtcgacgcggccaactgcagctcggccgaggacaccctcgactgcctgcgccaggtcccgatcaacacgctctccgcggttttcaacagtactgcgggcacttcagcctcgtacgcgccttcggttgacggtgacttgctgacggacgtcggcccgagactcatcgacgcgggcaagttcgtccacgtgcccattctccacggcgccaacttcgacgagggcacagcgttcggcaaaacgggcatcgacactaccgatgagttcttccagtacctggtcggcaccatgggctacagcgaggacgaggccgaggtgctgctgctcatgtacccggacatcccgcagatcggcatccccgctacgctccacggccgcccgggcaacgacacctcgtacggctacatgtacaagcgcgtggaggcgtacgccggcgacaacaaccagcacgggccccgccgctttatgtcgcaggtgtggacccgcgaggacgttccggtgtacagctaccgcttcaatgtggtgcctgcaggcatctcacagtatctcggctgcacgcacttccaggaggtcgcgttcgtcttctacaacctggagggcaacggctacaacaactcggtggccacggacccgttcctgggcaagcccgacagcttcaagcagctcgccaaagtgatgacccgcatgtgggccagcttcatcgtggacctgacgcccaacaacaacggcgtgaccgacgtccagtggccgcagtactcgctggacgacccgcagaacatcgtgttcgacgtgaacgtgacggacctcgcctacgttgagcccgacgtgttccgcgccgaggcgatcgcgtacatccacagcctgtacaacgccacaagctaagtagtatgtacagcttcggccccagactaatatgacaagaagaaaatgtaattgtgagtcttgatcggttgctgttcctcgcggttgaaattttgtgcagcgtgaaagctttgcggtgtggcgatgcactcggaactaatcgagctggggtttgctccgtcgaggccgtaatcggcccttgcagcggagagacgagtgtcctcatcctgccaacgtcggaacatggctccgaggcgcttccgcagtgcatggacgccggtagagcgcattattaatacatgtacacttcgaggccctcgcatgatggcgggcccagagcttgaagggcagacatcttgcttgcttgagcctgctgctggctcacgatctcgagagtcaaactgcagcaagtgcttggtgtcgccgtgtgaaacgatgcgcctcgtcttgctggctacacgccccgcccttcaacgggcagcggtgccacgcccgactcgatcgtgagcacgcgagggcgtggagctcgccttcgtccacacggcgggcctcgtggcgctctggcccaaggcgtcatggcctgcaagaggcggttcatttaacgagccgcttctgcaggtcgagcgagggcttcccggttagagattgggtagagcgcttctactgagaccgcgaagtgctggtcaacgtgcgtgaattgcatgccattccgctcgcagatgccgtggcggcaaaattttccccaaggctggcaagctcggcggcgggtcttcatctcgtcgaggaatgcaacagcactacacgagcgatccttcctgccatacgaacgaatcagctgagctcagcgctgaggcggagccaccgccgggtgcaagcaagacgctcgctccatctgagactctcagcaagctcacaaacgacacagcgtggacagacgacggtgcagcgtcgtcgcgttgtcgggcgtgagtgcccagggatctgctgggcgctgcaactttcagcgcgggtaggcgtccgccgcagcagcaggaaaattgaacgtgcacggagccagcacgcttcttccgccggcgggtcattcgccaaacggcccgcgaacaagaccgccccactcggtccttccgccactagcgtcctcggtgcgctagtacacttgcacctgcaccttgcaccttgcacctgcacttgctagtcgcgcgtaacatttcatatcagggtctgactgcttcagaaactgtgacagctacttgaccggcgcaacggccagcggacgcgtctgtattgcttggcatgaagttcccgctgcccaagaacatcttcccgccgctcgagctctcggagggccaggagcagggctacgagcagctcgcaaacgcgctcatcaaggccacgctcactgagtatgaccagttcgtcatgcacgaccgtaagcgcgtggacgcccgcaggtggaaggccatccgcacgcgcgacggcgtctccatctaccgcgagcgcgacgtggacggtgtgcgccggccggccccggcaaccctcgcgctctaccagagcgccatctccacgaccaggcccagtcagaacgcgcgcgcatcaggcggtggcccccacgtgagctccgatctctcggacagcaggaaccacacaatctccattaacggcccgctccacttcgggccgcctatgacgcccaagaagagcaagtcgtcctcggacacggactacagtcgggacaccagccgcaacgacagctacagcagcggcggcttgccgtccgagccgcgtatcaccacgggcgccttctccagcaccgacaacgagagtgcgggcctgccgcgccttctagcggtcggtacactgcgcggctcgctggacgacgtcatgtacggcgtcgtgtcgcccaacgcctcgtccgttcgcctgcgcagctcctacctgggggagcacatcgccgactgcgccgttctgcgggagatgaagagtccgtcgccctcggacccgttccgcttcctcggcatcaagtggttcgtccgcgccaagcaccgtggcgccgctcgcatcgtgctgcctcgtgacttcgtcgtgctcgagttctccggtgtcatgatgcgtcctgacaactcccgcgtgggcttccacctcatgcactcggtcgagatcccgacgtgccgcgagctgcacgagcaccgcatcttgcgcgccaagctgtcgagctgctacatcttcgaggagacgcgcaacaaccgcgtgcaggtcttcatgacagcctccgtggagccaaacggacacgtgctcaaccgcatggcgcttcgctcggccgccacggcgctcagcaactgctggaagtcggtgagctgcgcgcacaacaagaagctcgcgttttgtctgcagaacgagcggccgtcggccatggggctcagctccattgcgtcgacacgaggtggccactccctgggcggcaccgtcatcaggtcgtcccgaggcggactgtcggcgttgacgccggtgaacgagtccattgtgcgcgagtcgatcgcgcccgagcccgtatctcagcgcagcaactacagctcgacggtgcatcgtcgccagtgcggcgtctgccgcggtaagctcggggtgctctctaagtcgattctgtgccaactgtgctgcgagcagatctgcagccgctgccgcatcgtgcgcaagctcagcagcgacaccctcaactcgcaggtcacgcagtcgtccatcaacttttgcaagaagtgcgtggccagcgtgaacgacgagagcgcgcttgaaatcgctcgccaggagctctgggtccgctctcgtggccgtacgcgcgcgtcgtccgccatgtccaggacgaacgcgaggaacagtttctcgtcggaaaggaacacgtacgccactgtggtgcttggccgcggcagtgagatgaacagcagaggtagcacagcgaccagcagtctcggcctcagccgtggacccagcagctacagtcagccgagcagcttcagtcaaagtcgcggcccccagcaggaggagtcctctctaggattctcggtcggccctcgcccgtcgacatcaacgcagtcgtcgacaccgctgcagcggcccagctcaggaggacgtctgtccaagaacttttcgctcaacaccttcagcttgagcgctggcccgttgttgggcaacagagtcgcgaacgacgcgctatcgctctctgacctggacaacaacaaaggtgtcactaacgttgggacggagaagactgaggcagaggagcccgtggtgctggaccaccgcatgaccatgaccatccgcagtctacgccacctcgactatgtcttgtcggttggcgagcaggacctggtggacgagctcgagaacgaggacaccgaggaggaatttggtggctttgaaagcgccgatgaagacgagggacgatcaagctacgcgtcttccgtggccgtgctggacgacaactacgaggcgtgcgagacgccgatgagcaatgagccacagtctcagcgtgaggcccccatcgtcgaaggagaagaagacgaggaggtgggcgaggaggacaatgaggagcctgaacagaaggaggaacaagagctgcagcaggcggagaaggagaccgaggttcaggatcagtcgagtgaatcagtacatgaagagcaggagcctgaggaagaggaggaaggcagcgagcagacccaagtcgaggcccaaaagcccgagcagacggagagcacgacagtagcgatggcaatgtccgtgcacggggatttcatccacgcggatgcggccatggccgaggaggtggaagtggtggaggctgctcctatcgccgaggtgcacgctatgatgctgaaccagtacgagttgcagaagaacgccaagcccgacgctgtcgatgagcaggagccgaagcagcgcctgcaacgcgcgcacacgacggtcccgtcctcggacaaatccaactaccagaaccagctcctccagcagatgcaggacctgcacaacgtcgccgagacgacgtaccaagtggcccgggccaatactgaggcggccttcaaggagcgcgacagcggccgcatctccaacggcaccggcagtctacgaggcgtgcgaacgtactcgcagcccttcgccttcaacgtggtgggtctgcgctcgacgcgcgcaatgaccgtcggcatcgacaagtaaacgagcccgaagcgcgaccattatgagctgagatatttatcgtggagctgaaggatgcaagctatgctatcgagaccctagtgctgaatgtagagggcagagcattccggaataaaatatgtgctaagctttgcaagtctgcgtgcgtggtgctttcatcctgatagtttcttgccggccgtgctgatctccaaaacttcagtttgctaggtagtgaaggcggtgggacggagcctttcgattcgggacattcgcgcaggcgatgatgacgggggtcacctagcagcggtaaaccatgcgagcatatgcgcgctcgacatggcacaaccgttcacttgaccatgggagtaatgctgaagcacaattacaacaggtcatgtggttgattggcaacattgcggctcgtgaacgtgcaatacagcacatgtagctccgttggcatcgcgcctagacgagtacccgtggcccccacaagtcgtggagggtgaacgcgggtggatatttcgtgcagcagcgacctgagcgcggtcgaggtgacccaacttcgacattgaagagacggaaatggacggtgctgtcagatgctgagcacacgcggtggcaaggcaaccagaagctgtcgcggctcaatgcctgccaccccagagctccggctcagtattgtcgccaccaaaatatcggcggcttggggtggacactttgcgtccactacagtaccacgactacgaattcatgggcttggacaggtctcacttagcgtcgggcagtagcaccgccaccagtgctgccaaggggagaatccattttttcgcgtaggcacgcgaacgctttggtggttgtcggccatttagcgttggggcccacccgcgacagttgcatcggagtgcgcggagcgacttgtggccgaattgagccacgacaagccccgagctcgtcgaaagccacacaccgagactggaacttgcctgctggtgtctcgattgagtttattgcgcagtggcagaggcaccacatggctcaaggacgatcaccatccaggagcccgttgtcggcagtattggcaatactgtattgcgcttcggggtaaacaggccgagcactgccgccccacgtggccggaacgaactcaaattgccaagccctggacgcaacagcttgctcgagtgagcgcatgtgtcgcaccgaacgtccaaaggttgcagccagcggtgcaggtcggacgccaagctcattcattacacaaccttcacgctagcgctcaaaggtggagaagaatcgacacaacgatgaagttcccgttgtcacgcgcacccttcggtgcctacccgtcgctatccgcagcacaaacggagcggatcgagctaattgttcagcagactttagcagagaccctagcagagtacgaatcgcaccagcacaagcagcggcggctgctaccccgatcacactacaaggccgtcaagaaggtggagaacctcatctgctaccgccagcgatcgggagtcgcacccgagtcaatgctgacccctgtatcacgccccagcccagtccgcaccaacacattgtcacgaacatcgacgacggcctcattcgcgtccgccaccgacggcgacacgacctggcgcattccgaagctggtgacggttggcacaatggtcgggacgctggaggacgtgatgcacggattgctcgctacggacgcgacctcgaccttcattcgggcctcgtacaccaacgaggagctgctggacgctgagctgcttcaccgcatcaagtcgcccacgcccgagaggccgttccagttctgcggcatcaagtggcacgtgctggagctgaccaagatcacctctaagcgcgactttgtgtttgtcgaggcatccggagtcctcgaccgccccaacggcgagcgcttgggttaccacatcatgcactccgttgaccttcctggtctcggcgaactgccggagcagtaccaagtgcagcgaggtcgcatcgtatcttgccacctcttccggcagctccagaacaacacggttgatgtgtacatgaaaggcctggtggacccgagcggccacatgcctgcggccgtggccgttgcgtctacagttggtgcgctactgaagctcggccaagccgtcgagtgctcgcacagtaagaagctcgagtacttgctggagcaggagcagctgaagagcgtgggcgcatcggacagaaccaacgcgatcggccgaaccagcggctccttccggtctctgaaagccaacgggtcctccgcaccctgcggcgtctgctccaccacgctgcacgtgttccgcagcgtcgctcactgcgagctgtgcaccaaagcagtttgctctcggtgtcgcgtgaccaggcgtctgagcttccgagtcgcccgtccgaaggagctcaagcagaagaacaccgtattctgcacaacatgtatctccaggggctctgcgtacagtgccgtcgaagttgctcgcgccgaggtgagtgcacaagcctcggcgaagaagacgaacctggccagtctcaactcgttcacttctagccagccccggcggatcctggtcaactcaacccgctccagcaaatacactgtgctgacctcgtccaactactcgcgactggagacgtctgcggaggaggacgaagaggaggcccagcgacccagcttgagcagcggcgccaacagagtgcggaggcggtcgctgacccacccggccgtatcgaacgacaaggctgtgggcgagaagctggcggacctggacctcaccatcagtctgagcgtcgtgagctccagcagcgactacttggacgaggacttctacgagagtgaggcggggcgacggaagacgcagccgccaagcgcgttctcggacctgcctgagtgcgagcccgtggacccgcttgcgagctccatgccgcccaagcccaacgcgccggcgatgaacagccaactgcggcggcagcgcgagctcatgcggcgcatggaggagctgcggcagaacgccgagagcgtctaccaactcacgtggcgcaacacgcagtccatgcagctgcagtcgcagtccgtgtgcggctccacggccgacacggatttggaattggactaagtagtagtaggacgccctcgaaggcaggggcgcccgcagtattgcagtaagcgtaagcgctataacacggaagttagacgatcaaggctaaagatgaagactgcatcgtactcgtcgcgcgttgcacgcaaagacgacgacagacaccaagatgttcatgtgtatccgccagagccggcaccgaggcgttctcctccgccatgtggccaggtgcggcgagaatccattcgtgcgatgaatggattctcgccgcaccggccaaagacggaggggaggggcgctgactcgagaccaccaccaccaaggccaacggcgctcggtctccgtttgcgttggcagcgtcgcagctacgtcagggccggccctcggtccgccctcgctcaaagatgggctcgcagcagacctgcccttctgaacgccatccaagcgcagaatccgtgctcgaaagaccgcaacacgcgcgaatccagcgccttcgctagcacagcgacagccgacgcagacgccgcgcagtctttcggtctcgtcccactcgtgagcgcaactcccatagccagccagcaatcacgtccgcagacgcgagacattgaaggccaagcggcaacggagaagatgaagcctccactacagaagcaagcagcagcgccatttgagctggcacattggcagtcttgatcggcatctattcattcctacccaagcagcagctaggacttcgacgccattgcatccttcgagcgacaacttcaactgtgctgcgtctccggctgtttgaggcatagtgagctcctgttgtaaacacgtacccccccccccccgatctggttgacgccactcactcgcgaatccgccgcctgtcgcgcaagtcgaagttccatcccagcaagtcgaagttccatcccagcgtagggcggaccatgaagaagaggttcccgctgtctcgcgaggccttcccgagcgtgcccatgcccgcggagcagcaggacgcactggaggcgctcgcggagcagcaactggcgctggccgagttccagctcgaccagcacgtgactcgggacaaccgcgtcgtggacaaacgacgctggaagccgctcaagacgcgggagcgcgtcacggtcttccgcgagcgctcgagcgcggccttccaccgccaatgccacagccgcagccaggggcccacggtctcagctggaggttctccacacttgctgggccctcagaacgaggaggactggccgctgccgcagctgctggcggttggcactctagaggggacgttggaggacgtcgtgtacggcatccacacgcccaccgccgcccacgtgatgaccaaggcggtcatctcggacgacgaagtggtggacgcgcaggtcctccacgagctgcgcggacccaccatcgcgcacccgttccgcttcttgggcgtgaagtggctcgtcaaggcgcacccgcccgccatgggcgccgtcgtgttgccccgcgacattgtgtacattgagcacgtgggcatcaagagccggccggacggctccaagctcggccacttcctcatccactcggtgatgctaccgcagtacccggagctgcggcgcgagctgggccttgtgcgggcccgagtgtcctcctgcgtgctgctgcaacagcgagaaggggacccaaatcaggtggacgtcttcatgacgggacgagtgtccgcccaggggcgagtgctggacagtctcgcgctgctgtccacggccaatggactcacgtacttctggaaggcaggcgtctgcgcgcagcgtcgcaagttggcctggagactgcaacacaagcgcaagctgccgccgacgggggcggtggtgccaccggagcagtgtccgctatgcacgaagggtctggagcgagccttcagctccccgacgcggtgcgaaatgtgcggcgtccgcatgtgcgcgcgctgcagcgtgagccagaagctgctgttcccgggggcgttcggcagcaaagagactcacgcggtcacggtggagctctgcccgccctgcatcacgcgcacgactgaagaggacgcgatggccatcgctcggcaggagatccgagctggacagtacggcgcgcttaagtcccccagaggcgtcacgcagcgcaaccgcgcgttcaacgtcgtcaagcctcgtcgccgcagagtggacttctccgcttcggctggcccgccggtgtcgacaaacccgctgcgtagacaaccgaggccggactttgctgcttctgctggacctgcgcggactagaggcgacgagagcgaagatgacagtgaaacagtgacgcggcagtcgctgcaggccctggacaacttgctagagaactccaaggggcccaacgaccagcaggaggacgttctcacaggaagtgaaggtgagccgagctatcccgtgacgccgaagcaagcgccgatgacgctcgcagacctcgaaggccccgacagtggcgacaaagttccagcacaatctattccacaagcaccggccaagagcagctcaactccactctggaagagaatgtcagcgctgcaagtgatggccgagtccacctaccgctacaccaagaagacgacggagaagacgctgcacttgagtcccagcggttgctcgccaacgtacacatcatctccgccaaccagaccctgaggcagaagagctcaggactgacaacttgtgggcattgaagagaccaaatatccacgagttactatctatccacacaacactgaagtgaataaagagaattgagcattttactgcattcaagctccagtcatcttgcggaagcggaaatcgagtgataaatcctcttaataatatcgctgcaaacactagttgggtcttgctggggcccctcatcttcattcgaaaaccagaaaccattaaaccttcatctctaggaagcagccgctccacatgacaaaacgtgaaatgccccttccagtcggctcaacatgaaagtcgctggtatgaaacaaacgacattcctcttcatctcacggaaacccatgatcgcattgaccaaggacagcagaagtgcttcactccctggttcggaacgtgatgaatcgagacacctggtcagtcgcagtgcaaaccaagttgctcagcctccgtctcaaaaacggcattcatagcccgtctgtcaagagcttgcgtctgcaaccgctttgcgatgaactccggtgtgtttgcatttcccttgaaatacagccattctcgtttcgactcgctggccccgacaccacgagccccacctccacgacgatggagcttcccactctcggctcgatcctcagtttcctgggcgacctgtacagcaaatacgaagtgctggatgacagcaacgagctctgcaagagcttgcacgagcgtctgaggaggttcctagacatgctgagcaccatcgaccctgccaccatcgaggccaacggcctcctgtcgagcctcagcaaactcgtcaacgagttctccgctgctgtcaacgagtacgcggatctcgactgcgtctcgcgctggctcagacccaacacgttcccggacaacgtcaaggtcttcaacgaacgactcgatggtttgtgcctcatggggctcaaagaagcgaccaacctcctcgaatggcgcagcaagtacgagcaggacgtggcgaatgcgctatcgtcgtcgacccacggactgcgcgacaagatccggaaggccctggacgacgacaacaagtggccgtcaagcaagatcgaggagctcgtgctgttcgtgaagcgagacctgcccgagtcgcccgtgtccatgcgtcacaagcgccagcagttgatcctcgaggtggccgaagagcatttcctgtctgggaagaagctggacaagcccccgtcctggttgatcgccgccaacgaactctcctcctacactgaggccatcgccaagtccgagttcgcggagatcgtagtgcgcaagtggcagggcgcccaggtcgcagtcaagaagctcgtggtcgctgtggacaccaacccggtctttgagaagcagttcaccgtgtggcggacgctgctgcacccgaacgtggctcagctctacggggttgggacggatcgtggcgctcccttcttcgtctacgagtacgcgagcaagcagagtctggatcgctgttggggccagttgacgcccaaagaactgtggggggttctactccaggcgtcctcggggctgctctacctgcacagtaggaaggtcgtccacgggaacctcagcagctccaagatcctcatcaacgaccacggtcacgtcaagttgttcggcttcggcgcgtcctacgtccgcgaggacaaccagagcagcagcacgtcgcctggaaagagagaggagttcgcagccccggagtgtatcggaatcggagcggatggcaacgctgatgacgtccacagtcctggctttgagagtgacgtctacacctttggcttgaccatcatggaggcggtcgggaggaaaagccccttccagggcatggagctgagggatatccgcaagatgaaggagagcaaccgggtgcagcgaccggagggcatgaagaaggacgcgtggcgactcgtgcagcgaatgtgcgaccgcaacccgaaggaaagagtctcgctggcgctcgtagcgtacgaactcgagaagttggcgcagtagattggtcgcaaccccactcagcgactctatgctaaggaattcaaatacacttacgtgttactcttggttgtttgatggagtatcatcgatcgacaccgatagtacaaacaatgactgcgggttgtttgttgctggggcttgtcctggatcgttggcactctcatcactgacgatgttggactcggctgtgactcgaacgagtgccggactacctgccaatcgcctgaagaacgtcatcaatggttcaactaccagtcgaggcccagtttgggctgagcccccactgctgtcactctcgccaatccacgacgcccagggactcgcgttcggaggcgacaatgggagcacagccagcatcaccaacagcagctgaaacttctcgaacgagatcacctccgtgtgtgcgctgccagagatccagttgaccgcttccagtaagaaatgcagggcaggcagaccggcaccaagagtcaacaggttgaagtcgctcgcaaacatcgctagccctcggaacgtgagcatgaccagtcgacgaggagctgccgccttgggggttgacacaatgggaacaccaccgtccgcgtctgcgtgaagctcgcgtcgagagtagtggcgatgcagcagttggatcgcagctcggttggcggctagaagttgtcgtgcagcagctgcagttggctcttgagatcccgtcagctggaggtcgagctccttgcagcggcggatctgcgtcagaagtcgagcgccaagccgcagcgatagaggcaccaggaaccgaagcatgaaccactcctcgtcgtcgtcgatctcggggtcttctccgcctgcttgctgcatcgactgctccgcttgggccactacgcgttctcggacgatgagcatggcggctgtaaacccactgagactcaagtgagtgtctgcaccagcggctagaggcgctgcctggcgatgcgccatcctcgacgcgttggtcggcgagccttcttgagccattgttcgttcggcctgagagaagatgaggtccgtcacgtgaagtttaagcggaggtgcgttggctcccgcagtatgagacgccactagagaagacgccgacgttgtggacgctggagcgccaccaggaatcacgttcatatcacgcaacacgacgcggaattggctcttgctcatgcctcgttggtggacagggtccaccagcgccacgtagtagtggaagaggcaattactcaagcgcttctcggtcgtgagcacctgcagatcccggacgccgcgcagcttcaagtatgtgctcaggaacatgtcaagggctggttcgttagcgcagatttcctccagtcgcgcctcagctcctccctcttcatcacttggctcttcatcgttagggtcttcattgtcgtcttcgttctcgttcagtgcctcgcttagactcgattgcctcttgcccttcccgttgagcaccttggcggttgtcttcgcagcctgacggttgtgtgtcgtcactttcatcatcatcgactgcttcttgcgacgcacaaacgaggaacgggggagcaactgagccagtcgagcctgctcctcacgcttggcaatgtcttctcgacgctgacgcacatggaaccttgcttggagtaaagtctgctcatgagcctcaagttgcctccgcttctcccgagcgattgcggctgcgagggctgaccgagacttgtccagtccttcccacacccgtgacgcttcttgagacgtccgcgcgccagcagcgttcgcgagttctcgcactgcgtcaggctcttcccactgcgactggcctgtgcgagtgttcttgtagtagatcgcgcgtgacacggggtcttgcactgcagtccactcggtttccttgctggttacgacgcacactgtctgcttcttcttcttaacccacacgtactcttcgttcccatcgtccacttcacccgcgctctccgagtacgtctcgtattgctgctgggtgttggtcgctgagctttgggcctgctgtggctgtagagaggcatcgaacccgggcgggacttcccactgacacttgcccgtgaggttgttgtagtagaacgcttggccgctgtcgttgtccaagcactggacccagtcggtggtcgcgccctcagcttttacgtcgctgtagttgttgtctccgctgtctgcggcgttggcaggggcgagccaggaggttcctgcactcgctgccagttccctttccgcttgtgccagcagctcttcgcattctggatgcttgttcgcagcagccaaatccttcgggctcatgcctttggcgttgttcgtcagcgggtcagctccgtagcgcagtagaaccgccagagaagcagtgctgccgttgcacgccgctgcgtggatagctcggtcaccacgttggtcctccagctccagcatccaggagcgagactggttgttccaagcgcacaggaactccacacaggcgacgcgatttcgagcacaggcgacgaagaggggggatcgacccagcttgtctccttgaaggagatcgtcaccgaaggctagcagcgcctcaagacactcgggcgtagccgccagatgcgacggcttgaagcctttggcgttgcgtccgtgagggtcggcgccagcgtctagcagtagctgcaagcactgatgccagccaaagaagcagcacacgtgcacgggcgtatccatctgacgatccgccgtgttcagccacagccgacgcacacgcgccaacaacgcgcagcactccagtcggttcgccgcgcacacgtagaacaatggcgtccgctgctttttgtcaagccacgtcgacttcttcttcttgccttgatcgtctgcactctccgcctcgacgtcagccttctggagcagcagttctagacacgtgacgtgcccagtgtacgcagcgcagtgcatcggcggcatctctcgactcttgctgcactgcgcgcacacttgcggcgcttgttgagtagaaattgcttcttccctctcgggcgtagtgagcaacgcagtcaggcgaagtgtcgagtcgggagaagcagcttctgcgtttcgagcggtggggctcccaggcagaggggcgagcttgtgcgctcgagctgctggtcgcggctccatggacgacgcggagctcgcctctgcggacggaaccttctccagatacttggcctcaagtgagctgagagccgagtgcgattcgatccggtacatgcgtccctccttggctggaccctggtggtcaccatctcgcgaagcttgatcgtccgtgtcgctaccagaaacggactcgtcatcctccccgtccgccaccttcccgtcgatgagttcgtcggagaataattgctccgttgatatgtcgtgcgacagcctcgccaccagcttccgcctcgccttcttctcagccgctgtagactccggagttgcagaggtagagtcgccggccttgacgctgccgtccgtgtcgcccacgtacaccctcgatgacttcttcaccatgctcccaggttggtccaatgctgctagctagcccctccaaagcgtcgtagtggcctccagacacgaaaccttcagcaacggttaaagtggtcaatgcatcctaatacaccaccaggagatactttcaagacggtagaacgccttcacctttcattgatttgcaccgagttctgtgagtacatcaacactgggaaagatccgtcaaaatccacgctacataatggcaaaacccgaggtgccggacgttaagtggacacgacgtgcagccagtcgttcggcgcgagcgagatggtgtgcttgagctcctccaccacgttgtcgcggatctccggccgcgagagcatgagctggcgcgcgctttccagcacgtccgaggcgttccagagcaagatgcccatgatcttgttgcccttgaggtagtacacgacgccgcgctcgtagggcattcctcggccaccgttggagccggcactgatgttgggcggctgcacccagacgcccaccgtgcgcagcgaagagtccacctcgccgattccctcaataagtacgcctacaccagtgaggtggctgcggaacagaggctggtgtcggtacgtcttcatcttgccggcgccgcgcagagatctggccatgttgcgccccgctgtgaggccgctgttcactgcgtggtcgtatcggtcgactcgccgtctgcccaagtacgggtcgtagtagctggcggcgttgccagcgacaaagaggcccgacacagcctccagctgcgcgttcacgaccagtccgccgttcttctcgtcgcgctcgaggcctccgccagcgcgcgtggcccgccccatccgcagcgtcggggacgggtccgtgtgggtcgaggccagcaccacatagtccgcgtccagcgccgcctcgggcttgtccttgcccagcacgccgacggtcacgccgctatcgctctcgttgtcgtcgtcgtccacgctcggccgcagactcgtgaccagcctgtcaggaaccacctcgacgcccgcgcggctcaggcggcgcgccaactcgtccgccagatacggcggcagcgtgcgcgcggcgggcgcgtgctccacgaacacgagcttggtcttgaggtggtcgttgcgctcgtccgtggccagcgcgcaggccacctcgcagcccaggaagcccgcgccgatgaccagcacgctctgcacgccgcaacctccttcctcggagccgccggccgccagctggtccagccgcgcgaagtccgcgcgcgtcgtgcacgtgttgacgcggtccttgagcgcgtacgagacgcggtcgctgtccagcacgtagaagtggcgcggccggccggccgacgcgatgaggcagcgctcgtagcgcacctcggtgccgtcgcccagcagcacgcggttcttctccacgtcgaactcgagcggccgcttgtccagcagcagcgtgagtggcggcgagccgctggcgggcgacgcggaggacgccgcgtcctcctcgaagcgcgcgctcaggtggcgccgccactcgttgtagctctccagcagcgcgggcgccagcggctcctccgcgtcctcctcgtcgtcgctgtcgcccgcgctcgctgcgtccttggcgtgcgcgccgaagtcgaggcggggcagcgcgttctcgtcgctgagcacgaggatgtcggcgctggcgtcctcctggcggatggcctcgatggccgcgttggccgccgtgcccgagcccacgatcacgtagctgtggtgcttggtctgcttgcggcgcgtgaagcggcgcgtcagccgcatcttgtcgccgcccggcgggccatcggacgcgcgctgcacgggctcgcaacgcgcggaggaggcggcggcggcgggcgtaagaccaacggccagtgccgccgcaggggccgacgcgcgcagccacgagcgccacatggagcaggaggaggagtgcggttgaaggagaggaatgctatcgagaatattttcgtcaagattttcgaccaatccgcggcgtttttgcggatcgccggaatttgggaactaagttgaagtgaagcagctgtcagcaaacatcatcgtactcatcaacctcaagcgtgacgacgccttttaaccgatgccaccgctgggttgggccgaaccgctcgggagcaacccggcgcaggccaacaaagtcgaccagctcggctattgttgtgtttgtagccaagttaccacaactgacgattttgtgtgtactgctataccacaactagtgccgcgacccgggagcagggtggtttgttttcgttggtaccaagtcaaccaagtttcgagtactgagcaagatggtcaagggaagatcgttgccgagctaggccagcccagcgacggctgggggttcgcttcacacgaagccgaactcagctggcggaaggatcgccgacatgacgatggaagcggtcccaaccgttcggtttggcgacgaccgcacccaagaccgaggaagagatggagatattggagattatgatgaagaatggaagaaagccgagttgctcagcggggcagctgggacagcgggtgtctcgcctctcgccgagacctgccaaccaagatcactcctcctgagaaccgccgagttcgacggcctccgttcacgcaaccctgtgccctccaccaaaggatggacgacagggcacggagcgcttttacaggtcgccgagagcaaaggcttctcgactcagcaatcagtgcccgggacgtacgggaacaccggctcgcagcggtggcgagactttccttcgtgcttggcgagactcgcgcccaacccgggccgaccttaatctcttggcgctgccagccgagtaccctacaagctatgcctctcgggtaccggcagcagacataatccggccccgtgcagggacttaccggaacgtgtacacgtgctttaggcctagcaaaattctgctctgttgtttgttatctctgtcgggcgccctgaaggggcgcctccactattactaagctcctatacaaataccaaatgaaagtgggcggttttggatctcggccgactcttcaccgagctcggcgacgcttgagctcggctaagccggataacatgtccggataatcccttgaactcggctgagccggatacggcgtgtccggataacctggcgaactcggctgagccgaataagatgtccggataacccagtgagctcggcggagccggataaggtgtccagataacacggcgaactcgtcggagcgacccttggactcgactgggcgactcccggactcaattggacccggttaccgtatctggatggtacgtggtgccgtttagccgagctcggcggcttgaactccccatgacctcggctgagcgtgtccagtgccttcctgaactcgactgggccttcatcaccgggcctgccacgtgtcaccaggtcggggccggtgtgccttgagtttctgacaccatcagccgagttcagcggttcatcagcccactgagctcggcggacggtcatcccgccgagtagtacttggctcctggtacgttgttccactgcggccttgatgttccctacaccacacgtaaaacggtacaataaaacgaagacgaagtgaagctaaaagtgtgtttaaagcttagtgtttctgaggttttaggcggataagcccgttaatcttcgcagcaatgttgtccacgcagctcttaaggtcgagaagagctaagttgagttgccgatcaaccttaccctcaacgctgtcgtccttgataccccagacctctttgcggaacttaaccaagaccctcttagcggttttgacctgcttgagaagatccgattacaatttcgcacttttctccgcctcgaccggcgagaagaatagatcggtgtcaatagccgttacaggaggaggagtcggcgtagacgttgatgatactttaacgtcacgcgctttttggtgcttcctcttactgctgtggttatgaccctttttgtcccgggccatggatcgactccaaagatcgaaagaggcaagggactactacctggtagccagggacccttatacttctacaatgtcccgcgttagcagacacaaagcaggcgccctgttactgaaccgacttctagtaagagtacaacacaaccccgaaggttaggtactatccggtctaggcgtgggccaagccccaatgcggtatttccaccagcccacggcatgatgtacccacttcttcgaagtgtgctcccacagaaaactacacgttcgcaacctagagcgtccccactatgtagctagctccaatagtcacaggtaaactcgcttcggaaggtatccccacgagcaaccttgtcttgaacttgaaccagagcttgacacgacaagtgctattatgtcacacaagccgatgcgaagacccgaagcttgatgagcgcagtggcgagcgctcgaagagcacttgagacgatgttggaaagttgaaaagtgattgattgatccgatagtttagcgtcggcgcgccgccgccgcgcaaccagtagttctcggcgaccagggcactcaaacaagtatccaggtcccatcctaaagtctatcaatctcaaatcctagatcaatctttatctaccaacgaaaaactactaatcctattcgtagtttggccaaaatttgtgacttgcgtcccataatcaaaagtccggctggaaaacttgattgctgcacatctcaaggatttacagctaatgaggtcgcgcgaatgtccatgtttacgcgtcccataatcaagtttacttttgacaccagccaataggataccatataatgaatacaagcaatgcatccccgtattacgctgtccagcataaactgaagtgctgtgcagcagcacttgacgtgggagccctctaccatctcatacgtccaagtcacactcatagtcttattagggtcagcgtagagaagttcttaaaatggtaccatacctcaagaacaactggatgcctagatgcgtcccccatcaagaatacgcttcagaagtagctcgaagacgccttcgttccgaatgaagcatagtccagaagcaccagtttgagtgtccgatttactggccgatttcactcaaaaattaacgaaagacagtgtgtcctcctcgttgatgacttttctcttactgacactagctctacggtagagcctctacctacactaacgagttgatggcttccagagacctccgaagtgttggccgcaaatacgcagccttcatttggttccagccatatcaggggccacgaatgaacccattgcgcacttccatcaccttcaccttcttgctcattcttcgattcccctcgtcggtctcaagtgttccaagccccccccccctccaatgctgaacttgtacccgccagccaaccacgccgtgcacaacggggcgttcctcaacttctcgccagacatcgaccaggcgtgtcaggccatccacgaggcctgtcggggcctgggcacggacgagaagacgctcatcgccgccctcggcgccaagtcggcggaccagcgctacctcgtctcggtgcgctaccagcagctctacgggaaggagctgcgcaaagtgctcaagtccgagacgtcgggcgacttcggtcgcttgctgcagctcatctcccgcccgctccccgagggggaggcgtcgattctacgcaaagccaccaagggcttcggcaccaaggagaagctgctctaccccgttatcatgggtagaaccaacgtagaactagccatcttgaagaaaacctactttgaaaagtacggccgcgacctgggctcgacgctcgacggcgagctgagtggggacctcaagaaggtgctcctggccgcgctgcaggccccactggagcagttcaacccggcgctgcacacggcgcagcgggcggaggccgacgccgacgcgctctacaaggcgggccagggccgcctgggcaccgacgagcggacgttcattggcatcttggtctctagcccgccgcagcatctgcaggcggtgaacgcctggtacgtcaagaagcacaagaacgacctggttaaggccgtcaagaaggagttcggaggggacgcggaggacgcgctgctgttcctcgtgcgcatggcgctggagccgctcgagctgctctcggagctgttcgagaagacgatgaagggcttcggcaccgacgaggacgcgctcagtgcagcggtcgtgcgctaccacctggtgctgcaggacattagagctgcgtacaagaagaaattcggcaaggagctgcgcgaccgcatccacggggaggtgagcggcgactacaggaagctgctgctggcggtgttcgacgctcccaaccactagggcggatggaggagaaggtgtagcaagacttcatgtttaatagtctgtgattgggttctaatccgttgtacgatcgatgtttagcaggcgtcggcgagggtcgacgtggcgtagatgtcggactgtcagatcatgaaggacgagactttctcggccatgtttgaagtcgcaaagtcgatcactcccgattcgttcaaaaaattgaagtcgcaaagtcgatcacccccgattcgttcaaagcacctgacgcatacttcccctgacacttcttggaccccgtgtagaagacgatgcgagccccagacggcaggccagaccaatctgccgcgcgaattttgccgtcccagcagttgctgagcgagtagcatcgctgtactgccgtggaggagaaggccttcgtgggatcaataggcccgttgccgctgtagagccgcaggtcccatgcccaacttgctgatgctgatgcggtcaatgcgataagcacgttgtacaaccgcattgtactagaggtagatagaattgatagtgaagatggagatggagtgctgcttgggtatgggctcgtacgatcacgggtcgagcaacacccaacgttacttgatccaagctaaccacttaaacagggtgtcgaacaagtggctaggaagctctacttgcattgcgtacatttatttacaaggaactcgattccgggagaacgataaagcaagagatgagtactagtactcgtgctatgacataagaacaactctttgttttttaatacatgtaccgcccgtcgcggacgaaggtcaaggcgataaggttatgcagacttgccgttcgaagcgtattgcggggatgatggtacgctcgtactcgcgttcgctaacagcagcagaagagcaaccccgaagtcaacagagccgctcgcagcagccagcattacagtacagtctccatcgcgctgcgagtgccgatgccagccactttatgaacgtatcgtttttgagggtgaacctgtttgtaggaaaagatgaacaaagctcctgtgggaacgggaaaagataaactgcggaaattctctattgtctttctccaccagtgctttatcggttaacgttagccgaatgttagccctaacgtttcttccgtctgtagggattatcaaccctgttcgtttcttatcgcctgctggccaagcgatctatgggtactgtctagtgttcctgtgaagacgagcgtattcgttgtagcgtgggcggtatttctctttcttttcgaccttcagcaagtcccaggccctcatagaggacacgttttccttcagccagttgtcgaaaatttcttggcggtagctctcgttattcagcatcttgctcttgaccgggatcctgacgcctctttcttcttcctcgctgtcatcgagaccgtccgcaagtctgtggcctcgcaggaacctcgtgcattcgccagcgttcgccaccgaccgagtcaccacactggagactgccgccttgccggggcccgctgacaaggcgttgccacgtgcgagcagcgtggctgcagtaactacgagcaggacgaaggagagacgcattgttggtaggtcttggatcagcttgagcttctgctcgacgaggtgaattttggaatgaggctgctgagcgtaagaagtcgatttctggcctttcatccgtaagaacacggtgatcgacagatctctcacagcagcataagggatagattgagctgtctctagatacctacactgcaataggtcatgaaggtttatttcgcagaaatcgtagtttgcgtgagttgtttaggtacttggttagtgatctgccgtaaattaagcggtcaccggtcatttgaacaacagttaatctaattcgtgtcacgcatgatactaacgtagaataccgaatagtgtccggtaaggtattagagttccctgcgaatacaaggaccctatctggggtactgtataagaatacagtaccctcaaatacagtctcccataaataaagtaccgtgtcatcaaaaccacgagttgatgcggtgctgtgaataattcactcaatagcacttcattgtaccacggtgctgcgaggtggacaattctatgccgttcattcagcccaacttactagtagttgtcgcggattcgatggcgtctagcggcatcattcgccacgatgacagagactaaagagcggggcgtcaggttccggacagcgttgggagtcccaacttgggaccaagagtatcagggagtgtggaccccagcgactggcttacatgtttagtttaacttttgctcaggtacattacactggcttattattagtgggcaaaacgcacggagccaggtttcgccaatctttagccgggtctgctggggacgagcaaattgctggagggtacggcagcggtgaagaatctgtcgctcgattattctgacgaagtgtgaacgaatctcggccgctttattgcggaacaccaacgagttttcgctcttcgtccataaacattgttgcgggtgctcaaaggctacttcatggtccacctcaaccatctagctaccaagtatagacaattctatattagactaggaatcacaggacacataacggcaatttctctctcttctgacgaagtgtagatcgaagactagtcgctgatttgaactgcagctagcatcatttgctaatccatattgctggtgttgatggtaaattacttgtctgctctcttgctgcatttcagtgatcgtcctaagaagcctccttcactcttgggaacatagtaccttcgaatatagtatcctaggtgcctctgtagggtacggtataacattagtagatggtatactattcggtattctacgttaatatcgtatcacagttcctttgttgtgagttgtcaaacgtactcatctaagtatatctaacagaagcgaacgttctaaatgttagggttattgtggctttcatccgttttggcaaatcgggtggtccaagatccgatatatcgggtccgatttgctggagggctccgatttagcaggtggggctgagggaagcaaactatatctggcccgacttgcgtctgggggctgcgagttgcgaagcaggggccagaaatgccgcttttcgccggcaaaaaggatcgccgcgaaaacatgtctggggccctctcagatcgaggttgtagtggccgtagatgatcacacaggtgatttagctggccatagtgctatgaagtggctatatacagtgtactatagtccccaatttcttgccgttctaatgcgtcatgagaggtgaggaggtatggccaacttggaatgcctcccctctgagccttatgctactaactcaggtcagatatagctaaattggactaaccgatcatgtccattttataaaaatcggactccgagataacacgccaaatctctggaaaatgtgtttccatgtacaaagagtagcggcaataagaaagggttcaacgattaaagtactgaaggtatatacaataatcaagtcaaatcaaatcttgcggagctttaaacgtattgacttgacgaaataaatgaaacacgttagggacgttattattatttggcccgattgacgatggacttcgacgctacaggctcgtcgtactcgtcttcctaagacgcacgaccttcaaatacactggctgcgactcactacgacgccctgcttgtccatggtcaccgcacattactgtagctacgtctcggcggtgtgcttgctgagcttgtgcaaacccaacatgtgcacgtaggacaacacctccgcatcaacctgcaggcgctcatggtcttccttagcggtagtttgcgaggcaatgtgggcgagaaaataagtgtgacgggagcactggggcgctgaagcacaacggtcgttgatgcacacgcagtggttgagccactgcgtgtacacggagccactgtgaaaaatgcgactgctgtgtgtgtgccacatcactttgacaaactcagtacctaaatagaggccctgtgtaattcaatatttatgtgttgtcagaacaagttgctgaccctttcttattctttgtacttgtattgtaataaccggccaaaatgcccacctgtagcaaccgcttattagatctcaatcacctaattaatcagagtataaaaaaatcagggtataaatcgattgtgatccatatgcatcgctaggctccagtaaaaggtgggcattctgctccaaacgcgtctatatcgactggtttcacataaatccatcgtacccactcacgtatgcatcgcagggacgcgatcgatttacaaatcgatcgagctaaatcagggtgctaatcaatcgatttacgaccaaaatacaggcgtccccggcctattcgccacagtggtactaatgatgtttgcgaatcaacaagattcacgcggtctgaacataaatgagtatgtactgacttactacaagcttagctcaagaatcggtggaggtattcccgcaacgtgccacttgtcgcagtaggtatcgctgtacactcatctaaatcaatatatttgcagaagtagcgcgcaaatcttgggagcttgttgtacttcctgtgcaaggtacattaaaatatacagccgggactagcccggggacgcctgtaggcaaaagaagcggttttcacacttgcttagtactacgtagaagtttagcctcaaccatatgccataaatcaggctctcgcattggccaaaatagaaattcgcttaggagaaaacttcgcttagcctaaggacaggagcgatacggtatactccaaggtgctgtcctgtttgtgaacccgctctggaggagataaatgtcggtgaagccaacatcggtaacaccaccaagttatggtgcaggtcaggtcttgaaggaggcggagaacttcgtgtggatgttgtatatcaaggagagtgctgtaggcagcttccttgcatgtccttcataaaaaaaaactgattgaaactcggtctacttagagcgctgcgcgttcatggcgcagatagctcgcttgttttaagcaataaacaaacggcgcctcctttgtacccggtcaagttgcaagtttttcaaaccaaggttcaaatgaactttccatgcagattttaattttaggctacgtttttcggcgattatcaaaaaaggaccacactgttcactaagtcatgaaaaatgttacatacgccacgcaatctgagcttaccagccactttgttcagctggttgttgcctcctcgacagctcacgcaaaccgtgtctttgttgttcactgtgattcaggattggtaaaaggatttctaatgtaatcgtgatggcttcgattctcgttcttttcgcgatgaaaatatttattaggctcgagctggatagcaattaagtatacgacgcttcctctattatacatgtaatgaatgtacttcgtaagtaaatatacgtcgtgctgaagcgacttgcacagttctaaactgtcgttatacatgtataaccaacgttgaatgaaatcacggcttgcgtgcattgtcaaggctacaacacgcagttgaattaactggctggtcaccagcctggtgagctgtgcatcaaatgtatgtataattgtctgccattgcgtccccgtgttgccgatccaacaagagccaaacaaatttctacaccagaccgtatccacacaaagcgcagtgtacagcaccggaagccttccggcggaaggtaagacacagaagtatatgcacagtgctggtacgtcatagcacgaatgatgcgatggagacagagatcgaagaaacagcacctacagtttaaggaatgcattaggattcttggtaacgttcagagaattgctgatcaaggtcaccaaccttacgatccgaaggcatcgtcgccttccttgatcatcttgaactggtatgaaccgcgtccatcaaactggcaacggatcgcaacacgttagcttaagacaaaatccccaataataattccgagaatcacacgaacccacctgtaggacgtattcgtgatactgccagagcgaccggcggtgcgacaccgtgaagagcgtgatgttctgttcgcggcagtagctgtacatggcgccttcaacgtccacgctgacggctgacgtacattcatcaagaatggcgaactggggtttgtggtagaacaaccgagccatggccagtcgctgcttctcaccgccggacagcacgtcggtccaatcctgtacagcatcccagccgccctcgcgctcgacgaggtgggcgagctgaactatatccaggaagtgcatcaactcgtcgtcgcctcgaccacaggcttgcatgtcagcgagggagtgagggtagatcacttggtcgcggagactccccaacgtcagatacgggcgctgggggatgtaaaagagtccgttctgctttggcttggtcaacctgccgccacagagaggccacaactcgcccagaactcggaacagtgagctcttgccgcagccattgggacctgcgaccaccacattcatccccgtcgtgaccttcagattgagcgacggcatcaacacctcaccgtttggggtgacaagaggcacgtcttcgaactgaatcacgtggtcacggtactgcagcaccccacgacgttgcagcagttccaacttcactgtagctggaccagtttcagtctgatcgtcgtccactgacgcgtattggtcgccgttgagaccagctaacacgtcgataaactccgtgatgcgagctgtaaacccggcgagtcgtgtgagctctcgacccgagagaaccagtcgacccgttgcctctgccaagttgatcatcatttttcccgatcggaagtagtattccatttgctctgcatacgtcaagcctgcaagccggacgttgttaggatccatgaacggcttggacacgacgtagtagccgaccacgatcgccaggtacttagccacgacggtatccacagcgcccactgcggttcggcagtgctgactcgaccgaatgcgatcgatgaggacacggaacgactcgtccaggagatttttctccctcacattgccgtcgtagaaggcgatctcctcgctgtgcgttatcagccttgagttcatgaatcggaaagtgccttccgcttgttgctcagcgatggtgaagcggcccatcggctgcctcaaccatgtcagaaagacccccgacgtcaccaggtaactcaacatggtgattggagcttggactcccacagaagacgtgagtttagcagcgtagatggcgatgtccagcagcggcttggacaggttcaggtagagttccgtcacggagttgctgaaccgctcgacgtcgaccgtcaggagctggtcggcgttcgatacctgggtactgaggttggctactttgtagtagacgaagcctttgaggtattgcgcgtacaggtacgaggtcagtcgcgcccggaagcgcagactaagctccgactggccgtacttgagcaggcagttgatgcaggacatgggcagcatgacggctatgaagcggcgcaggtggagcaggaagtcccgctgcgagcgagagacgatggcccgctcgatggacgtgaacaggtgcagcaccgcgatgtcgaaggacgtcttggccgccagcatgagcgccaccaaggctgcgaagcccacttcagcagagaacgggccggggacgagcacgcggaagagccgaagaaaccgacggaagaagtctccgttcaccgccacgtttcgctgggtgttgggagcacttcgctttcgcgccacgaacgccgagtcttggtgggatgtagcgttggccttatgacggccgtgctcacggattgcgatcgctagcgcgaccaacgcaccgacgctggagactgcacgcgccttggacaagactgccatcgggttttcgaagcgctcggttgcgggctggagatcaatttcaattgtgaggtgagctggaagcgttgctggcggctccgatttcgccgggtcgccgagctcgcgacatcagcggggtggaagtgctggttcacttcatctcgactcccgctgattgtccgagcggcaattggcagtgccaccccacggtccgtcaacgacaagacagcgaagcgtgtcaaggcggacacggtacaagtaacaacggctagtagcagcgaaagcatttttttttgcatgaactccatattgacagatgaaagagcgactgctacagcacatacatggctacgagtagctcgttagcgcagcgcacggcgagccttgcgcttactcttggtcctcgttgacgaattgaagtcgccaccgcccgagacgcggatgattgcacgtcggcagcggtacagcaggtagacgagggtgcccatgagcagcgccagcaccaggaaaaagaaaatgagcccgaacggctgcggcaccagctcaaacagcgtcaggaggacgttgatcagcggtcccgcaaacagcacaagcatcatgaacactgtgcacaggaagaacgacgcaaaggcgcggtagtacttggggccaatgagtgcttctagcacgtagcacgggttccacatggccgaaaggtgaaggcggtcggcgggctcaggcaggaacgggaaattgttcggctcgcctcgccccaggccagcggatcggacctccgctaggtgcttaggaagaatctccactgatactagcagctcgccagcacgcacacggtcaccagtgcgcgagtctcgagtcgtcatcgtaagccagctagcatcttcggggtcatcgcccatgcctagacgatgcataaacgacttgacgagagactcagcattttccatgtcagcgtccacgtcctctggctccgtctcatcggcatcgtcaatgtcagcaacatccgcagaaagtaaaggctttctgtcccctctttcttcctctttgatgttgataaccacctctccagaatgcggcggtcgttgacgagcggctgaagtagcatcttccgtagaggaataccctgagcgtctcgaagccccttcgtatggcatactttcggtgcctcggatgcggataggctttggctttgcgaagacattcaccgcctgttttgttttgaacgccgtcttgaggaacgacgttaggtcaaccactgcatctgcaagacagtcgtcatacacgacgtctcggtcccacatttggaagtggaggtagccgcgatccgcctccttctccgggtctagcggcagctcgacatcaaacttcatgcgccagttgaatgaggcgcgtccgttcctcgcccgccagtgcgtgtccgtactctgagacttgtcatcccgattttgaagccagcatttcacaagcaggtcgctcagatccgtgaaatccccgggggtaacattcttcgccttgtagatgataacgcgcacttcaaacatctgaggtggaggcagcgaaatatccagcggccttacgacattcatttccgctcccgtgaggatatctacccacatacggaggcttccttgtggaagtgtacttgaaggggcaaacagtggccgaacctccagtggcttgcgccgttcggcccgttctggcgaaagaccaagctcttgccactttgcgtcgaaccacctgtcttccaaatcgatgagcgtagcaccaacgaagtcatcgtcgtccacagtagtcccaactgcagtgctcagcgctttacttaatccggccgggagtgtgggaatcgcgaaaaaatcgtagtccagaacctccagctttagttccgatgcgccgggaaggtctgccttgaactcgtacattttgtgaaatttgggcgtcagggtctcgggccggtaattctcacggtcgttgaacatttgctcgcgacgtcgtccatctccgaggctcacacgtaggtatgggtcgcatctgttgttggcatctttcgggtgcaagtttagtgcatctagcacatatactcgaactaggtacggctgcgggttgaggaactgatccaaatcgaaaagaggtggatcgtcgcgtgatttcagaacgcggacaatgcctttaaactttccgactgggcggtaggtgtccgaagcgtgttcgcttgattcacacccgctattcgaggacatcgacccgcggaaaagggtataggtctcgaatggagatttgagcgtgtcttccagctcgccatcgacgatctcacgctggtgcatgtaatggggcaactcatcttcgtcgtcgtcgtacataccgaagctgcccgatgaacagattccaccgatgcgaattgtgtttggcttcttctgggacttctcaacgagagcactcggagacctgtccgccatgatctccgacggaactgtgccggggaacgtggaaagatcgtcgccataatcaacgtacgggttgctctctcgaatgatcggcttgctagattcctcgatgtacaacgggtttggctctccattcgacaacggcatctttcggcttagatccaccgcgcagacaccgattactggcttgtagaagccgccaagtaactgatcgtacaccgtaatgttaagtctcggcgcaaacagcgagtccagtggcatcttcaccggaacgacaatccgctgcaagaagttcggattgcggctgctgggtttcgaagaggggttcgtgaacttcggttggtttgtcttggtgatttcaccgatttcaaacttcgcgaacggtgtgttaatgggcataaaccccgtcggttgcagcccgcggcaccccaaacacataatttcaacgaaagcctcttcagcaggcggtcgaatcgactcaggaggctccacgatgacacccggtgtgtccttcttgatgagatcaaacgacagcaacagctcaccttgcgtatcgcccggtttctcgtagcagataggataccacttcgggcgaggtgccgagtactcaccgctggctcggatcttggaatactccgaggatgacatctgcgggaagtctcccaagctgaactttagcccaccgacgtagtcatctgcgtcgtagcgatcccagtcgaacacctgcaaggataccttaggtaggaactgctcgttctgcggcaattcaacgtcgagcacaaccgtctcataaaagcaagggtctcgcgttgacatccgtgtactgacttggccctcggatccaacgcaagccaccttcacgtaaggatctaacaggccgtcgaagtcggcagatggtaggcactttccttggaaaacgtggacgaaaagcacgtatttcatgtactgcaccgtcgtgttcgcatgctggcgccactgctgcgcaatttcctcctcggggcgctctctgtgctcggattcttccaggcgaagattcatcaggatgttgccagtaaaatcatggtccttcagctcgtccagaaccttgtcttcgttaaggacaacccactgtggcggtgggatggcctttagcgcatcggcgtcttggcagaagagatcttgagctttaaagcgagcgaaacagatgcaacgggactcattcattgtctggtgaatgaggtgtacaaacacgtcagggacttgatcaaggtctgcagggagctccacgccaacggcgtcaagatattggttgaagtggcaaatcccagagacgttgtgcgcccgcgaactttcaacgctgtgacggcccactgaaatcttcagtgacattcgcgtatttcggttccaattcgttttgctggtgaaaacagggatttccgttccataaaagagtgccgctcgcagcgtgtatctcctcgtcctaggcatgacggacgtgttcaatagattccggacgtgcgcttcatcattcacggactgtagaccatcttcaacacgaagcgacatcaagagacgcccgcgatacgtgctggcatgtgcagggtgcttctgcatcagctgcagcgcactcgattcagtatcgtatcccaccggcggcccgtacaagttggcccaaacgtgcttgaattggttggggtagtttaacacttgcttgaaggagaacggcttcaaagtgttggcgacgagctggtcggcggtcatatcccaatcccacaccgacaggaagatgttatcgctcattgttggcaaaaggacggggaaccacaattcctggttgaacgccactgtaagattttcactgcccttcaccgtcacctttttcgtttccagcacatcctggcctgcgaagtatgctcgaacatacccgtcaatgccgccatgcatcatcatactatagtccatgtctggcagctcttcagctcgataaatcgtgatcaccaagaagctcaacttttgagttacacgcggcggaaccagcaccattgagttaatgtccgcctttgactttactgagtgctcgtctggatctttgtcttcggcagggtcatacagcttcattttgtcgtttggccccaagacgacaagcgaaagtctgtgcgttgagtaaaagaaaagtgtcagatacgctctcgaaccatagcataggatatgaaatgagtcaaacttacaggacgtagccttgaatgctgtcgctgttggttgtcccgctgccgactaaggctacccacttccgtttcaattcatggtcgggctggaagtacacatacgggatgtccacagaaaagaagccaacgagatcatcaaacgcgcgagaagcagctgaccgattcgcagatgtaccaggtccatcagcgtcgaataccgaaatcttgatgcttccttgctgtacggtatctttgtctatctttcggaagttgaagtagaggtattcatcaaacacacacgacagctgcttctgcttgacgaccgtgtgctggcgctgaccaatgcactcgaccgacacaacagggtcgcagagaccattggcgtccatcggctgcaagtcacgcacttcaatgattcggacccgaacctgataatctcctgattgaaactgcacgcttgagagttcagccagcattttttgccgctcttcttctcgctgctttcgctgcgcttcggcctcctcccttcttgcatcggcatcgtcatcatcgccgccttcgttggggtcttcattcgcttcttcaccgtagttgccaccattctcaccttcgtcttcttcaggcgcatcggagctgccttggtgccgcaggccgcggccacttggaacctcagtgacgttgtcaatctctccttgctccaggctaccgatgtccctgtccaggtactgcagttcaatagccagacagatcttgccattgccataattcatcttccgctgtggactcaagtcactcggaccatcctgttccttcgactctggttgttgctccaatgccaaccagaaggcctgcttctctccttggaagcgctttgtgaactcatccaggtcgatgacgcatcgccccatgaaatcgctcgtgagcagatcgctatcttcaaccgtcagctccagaagctgcttttcttcgggcacgatcgtaaaataaaacctctgacgccacgacggatgcagcgtctgctgctgcgttttcgtcctctgcgactggttcttcgagcacgaaatgcgcacatacgggtcgctcgtagcttcaatgcccgtgccatcgcacgcaagcagcccagttgcttccagaatcgtcaccacatagaaatttggcggctttggcgattgctgttcagcttgtccctcctttgcactcaccaccggctcagcagtcgaaggttccgcaacagaattccccgcaggggcctcttcctcactagcaacaggcgttccaacgctgctcttgggtgaggttggagccgcaagcttcttcggcgatgccggcttcttcttggacgttccactgtcctctttccgcggcggcgccatgaacttgggctcgtatgtcgcctccactgtcagttccccgcaactctgcacacatcagcccatagtaagtaaaaggagtactataaatttgtgcaaatgcagacgacccaccttcccggcagagtctatcagcggcagcttgtgcgttgtgggcgtgtcgggggccaaagcatcgatctgcagcgaggcgctgccaagcagcacgtcccggccgcgagcgttgagtccgaagaccttgaagttgacggcgtcgcccagcggcttcttgacgccaaatgtgaagttctgcgcccattctggcgccgtcgccttggcctgagcagctgtacgcagcactacgtcaccgcactgcgcctggcagtctggaggtttgcaaacacagccacacaacgttagctacaggtcaaggcagcggagagaggggcagccagagcacacgcacaggggtcgaaggccgcgtcgccgaccgcctgggcgccgcccacgcccgaggcgcccgccaccacgagccgcacgcgcggagtctccactagctccgccatcaaagtctctgcgcttcactatgccagtccgcgagtacggaaagatcgcccgctgatttacttgaagccacgaccggccaatcagcgtgcggcggagtgatggtccgtttggtgtacgtgtggtgtaggaaacgccaggaaggatcgaccatgacgccgcgccggttgctgctgctgctcggcggcgcgttcttcgctgccgttgcagccgccgccgacctcaagctgaagctggacgcggagcagcccgtgaccgtgacgctggcggacggctctacacgcgagctgacggccgccgagttcgagcagctggcccgcgagcgctcggagcagcaggcgaagctgcagccccaggaggaggagtcgacgcgctggaagcgtcgggagctgcgcgacatccaggaccaggacccgcagttcgcgcttcacatcgacctggccaagcgcaccttcaaggagctacagcgccacggatacgcacagggctacgcgctcacgggcttcagcgagcaggacgcgcggcccaggaagcggcaggtgacggctgactactacgtggagctggtactaacctccaagaaggacccgagcagtggcgtgccggctaagacgggcaccggcaccaggaagaacgacgacggaccgctcagctacgaggtgcagctgctgctggacgaacagggtgcgtgcagggcgctgaggcggacgctcgctattgcagggttacactcttttgacatgttcgtactgtgcttttcggtgtgtgcagagcgcttttcggtggtggcggcgtgggagctgagcgaaaaggagccgcccaagggacagcgcaagcggcgagtggtgcggctgtccatccagccgacgccggcgctgctggagcgcgaggcgaagcgggcgctcatgaggccggccttcgcgacgtggctgctggccggaggcctggcactcgtggctgcgggcgtgctcgtcatgtacaacacacgcaacccgattccggcgcccaagccgcggcggcgctcgagcgacatttgggagctcgtcgacgagaatgacaagcccatcaagcttgaggccaagaagacgcagcagccggtgaaggacaagaagaacgactagcggcgcgtgacacgtagacccaggcggccagctggaccatgtgcggagctgtccgccttttttgagacgagtgaatggagtgtctcgcttggtgcaatgcctgttaaaggatcctgctgcgttgcagcttggctcggctcggctagtcgctacccttgccgccgcgcaattgcacgacgcgacggcacgaaggtagccattacggcggcggactgcgcgcgcttgaagagcgtccggtccaaatcgcaggagcgtgttcaacgtgggcggcggatgccttcgcctcatagagagtgagcgctgcgctgcatggacacgcagcagctttctaccattttcactacgagaagccgcagcgaagcaatacaagcaggtttactgtacatcctgcgcagacccgtccattacgtcgggcagcagaccgtacacgcattgcacgtgttgcatgcctgctccatctgatggtgtttcacaccggtcaaatgtgccgccaatattcgccgcgaggcagtgggccatctggcgtctggatctcgctgattggctgatagtttttcctgccaatgggcgcgcgccgagtcgcggccatactggcgttgaatcagaccgagtgcgcggcgccaaccagccagccactcttgataataacttcccggggcgacgatggcgacgctgagcgtgctggtcacgggcttcggcgtggtgcgcgacggcgcgcagccggactgcgcggtgttcctaggcacggtgcagcagggcggcggcgcctcgtggaccgtgtaccggccgttcgaggccttccagcggttggggcagcagctctcgctcatcttcggtcaggccgtgcccgcctgcccgccgcgcatgttcgacgtgcgcttcccggactcgctggagaaggcgcgcgtggacctgagcatgtggatgatgcagctgctgcagcacccgcccatctaccagtcgcacgtgttcgtggacttcgtgagcgccgacgccaacgtggcgcccccggggctgcagggcgccgcgcccgccagcaacatcggcgacctcgacatggacgagatgttcgactccaccacggacgacgacccgcgctcgcacgacgagctgcacgacgacgacgtgggtggcagcaatggactgagttgaatgcgcacattggtgccgaatgactgacgtgttctttggggggttattgggtacagatgttccagttcgactacaacacggacatgtcgggcgccggcctggaccagcagacgctgctggaggagacgcagctgcagcacgcgcagcaggtgcaggagcagaagaagcgcagcgagaaggtgacgctcgaggactttgtcatgatcaaggtcatcggcaagggcagcttcggcaaggtgctgctggtgcgcaagcgcgacacgggcctcatctacgccatgaaggtgctgcgtaaggagaacatcatcaagcgcaaccaggtggagcacacgcgcacggagcgccacgtgctcggctacgtgcgccacccgttcatcgtggggctcaactacgccttccagacgtccgagaagctctactttgtgctcgactactgcgccggaggagagctctttttccacctcggcaaggtgcagcgcttccccgagcaccgcgcgcgcttctacgcggcggagatcacgctcgccatcgagtacgtgcacaacctggatgtgatctaccgcgatttgaaacctgagaacgtgctgctcgacgagaacggacacatccgcctgacagactttggcctctcgaaggagggcatccaggatgacttctcgggcgccaactcgttctgcggcacgcccgagtacctggcgccggagattttgaaccgatcgggccacggccgagcagtggactggtggtcgctgggcgcgcttctgtacgagatgctcacgggcttgccgccgttctactgccgcgaccgcgaccgtcttttcgagaagatccgcaagggcgacctgagtttccccaagtatctgtcgccgaacgccaaggacctgctcaagaggctgctggagcgagacccgacgcgccgtctgggaacgggacccaccgacgcaggtgagatcaagaaccacccatttttcgcagagatcaagtgggacgcgcttgcgggcggtcagctgccgcctccatggcgcccgacgttctcgggggcgcttgacacgtcccagtttgaccgcgagttcacggacatgcccgtggtgagccccgacaacaatgtgcgcggcatggcgatggctatgggtcgacgacccgcgaacggaaacgcgtacggcagcagtctcacgggcaatgatccgttcaagggcttcacatacacggaggactcctatctgcaagacggtctccccggccgtagccctgccacgcggggaggcggccgtgtccgccaccacaacatgtaacaaggcggagggtaaatgtcgtatcagaaaagatgaagcgggagtcaatagcaggaggagaggcaggagaaagattcgggtattcgagtcggcgaaagcactgtgttgtatgtgtaacaagacgatgcttacggctcggtcgagggacgccaagtgcaagagtgacgcaccctcaggctgtagggacaggaaagaaggcaaggtgacaaagggtatgtacatatattttgctgaacttccgctgcagctcgccaacgtcaattagagaaaagtttttgggcattaagataaggtcttgcgcttgagcaaactcccgttctcctcttgggttcagcttatggcaagggattcaaccaactcagaggttggctttgtcgaggctttgtgtactttcgaagtggtttgccatgactcgaaagagccgttgaaacagtgccggcgagtccctgtcgaagtgtgttccagccatgtgattcttctcgacgcgatggacgtaccagtttcctcgcctcagctcggagtagttgaccggatccgttgggtctaggtctgacccagtttggttgatgttcaggtttcggtcctcagtgagctcattcgaagttgaagccgcaacttcggttgcttcgaccaggccactgagtgaagacgctgttgatgtcgtcgactcggtatcgctgtcggcggattccttggataccttgctgtcgatcaatgcagtccacggttgcagcatcgagtggagattcacagctccgtcgttttcactccacagctcccgatcaaagccctcaaaaatcttgttaagtgtccgtacgtggcggcgcatgaccaacagaagagcgtacaacgaggggattgaggcgtagtccagtgctcgaacacgctggcgcagcgctgggagaagtccgagcaagctcagtatcgatagagtggtcaatatcgtgttcccggtggaaatgttgaatgctgctgcaagtgccaaagcgatgacgagtgtactcattgcgatctcgacccggggcagcgtgacgtgactggaagtggcgaccgagacgaggaagatcttgtccatgtggatcaactgcgcgtttcgcttcatgcgctcccgaggcaggatgttgaagactgccaggtcggtggagccgttgatgcgtccgtagggcgacagaatctctcggaacgaggtcacgcactgccactgcggcatcttgaagtcgaacactcgacgcagcacgggccagtccgtttgcagcttgaaccagacccccaacgctgctccaatgaagtgtccgagggaatacggtaccatgcgcagctcgtgcagcccgaagaggtgcgtcaccgtggagcctgtcaggggcccagcgatggagaccaggctgacaacccaccgatagtcgctaccgacaccgaagaagtccgagcagatcaattggtacagctccagcgctgtggtgcctccgaagctgtggcctacgagatgcacggggttggcggcactccacgtcggatgcagtggagcttcgtacgtggcaccgtagcggttgtgaccagcctcgcgactgtgctgctccccgtagtcgacgcgaccgccgtacagttggtaaaaggcttcacacgcgcggtcgtggtcggacgacaaggcccccacgtccaccatgaggtggttctggttcatctcgctcagggccgtctccggccagtacggtgaccaggtattccacagcggacgggttttaccatagccgaagacgccgtggatcagcacgactgggtgcttggtgctggtgataccggatgtcattacactgttgtacttccgctagacgatcgcaatgcggcttggtgctgctcgacgctcgccgtaagatgtggaaatgagaagcttggcggttgcagcaccacaggaatgtttgctttgcattgtcggacccgatgcaggttgcgccagcgcagcgaatgccgccgaattcgtcgaggtcaaagataggcctagcgttgagcgcttaacaagatggcgcgctacctcgcatgtaggtgtgcatgtagcttgaaatggcgacaagaaactttggatttggtaagtttggccatcgctgcaacatggaccgtggtaataaactatttttgctggtacattagcaagtctcgagcatcgatttgaccaaggatcattcacgcaatatggcctactccagccatctacctatataataggtagtacctaccgggtgcttcattccccacgaaggctttcttgactttggtttcttctgaagatccacgtcgccttcgcattctgccgacagacacggtgctcgtggctattgctccgttggcgtgacgtcgcgtagtcgtgttcgtattcgctgacaatgcgcctgaagaggtccttctacagctctgctgcgtcgttgtcccagtacgccccggcaaagtggttgccccgcacatgccacacataccagcgacccttttccaggccagtgaaagttctctctcgagaactacgtgtaccaattgccgcctcaattgggcgtgggaaccacggctccagcatcgagtgcgtgttcacacagccgtcgttcggcccccgggttacagccatcgaagaccggtggcaggtttctggcattgcggtggctgatccacttgaagacgtccagaatcggcagcgtcaccacattcgtacgcctcactttgagcagcacgtagaagccgagcaagaagcggaacctcagcagaagagctcgccacttccggaaagctccgtggtaaaatatcaccgtctcgaaccggaggagccgtgatctccggggacgacacgatagtcagtaagtagagcttgtcaaggtgctcgagtccagcgttgcgagcgatgcgactcgatggtaccgagtcatgggcacccaagtcttggaagttgttcacgtggccattcacagccagcatttctcgcagcgataggttactccattgacccaagtggacgtcgcacgcgggcttgagcacgggaaatttcttgtgcaattggaaccacagcacacaggcgacgtacgtaaggtaaatgggactccctcgggtcattttgccgtcgctcacgctgatccagtgggccatggagaaccccgtctggctcagcaattgacacgatgcttcttacccagcgatagtcgctcccgacgccaaagaagtctgcgcacacaagttgatacagctccgtagccccaaagctgtgccccaccaagtgcacagggtttgaggcgctccagttgggatgtggcgtcttgtacgtagcaccgaagcgttcgtgtccagttcgacgactgtgctgctcgccatagtcgacttggccactgaagagctggtagaaggcctcacaagctcgggcttggttcgaggtcaaggggccgacgtgcaccacaatgtggttctcgttcagcttgtccaggatcttctcgggcctgtatggacaccagcgattccacatcgaccgtgtcttgccaaagccgaagacgccatggatgaagaccactgggaacttggtggtggtggaactgaggggaggtggctccatgcgtcctagacgacgcgattccagttgtgaaatgacgaggagaagatgaagtagatcacagagatgttgttcttgtggttaacaaggtggtctgcccccgcgtcccatacgaatcattgtgtctgatctcattcagctatagaatggcgcacggatgctggtgccgctgccgtggcgatacatttgatggtgtccgccattggtagaggaagtcaactgccgctcgtactccttgctcatgagcgtgaacaagctcgtgtacaagtcggccgcgttgctgtcccagtaggtccctgcgaggtggttgctgtccacgcggtagacgtaccagcggcccttttcaaagcgtcgagggccgagagactgctgctcgtcgtccgtgtcccgggtgaatccgtcgatggagatgtgggactcgcaacgtgccagggctgtgtctttcaacgatgaagtggacgacgtcgctggcagggacggagctggcgggctcgagtcgctgctgttgatttccttctccatctcctgtggcgacgggaaccacggcctcaacatcgagcggatgttcaccacgccgtcattgtgctcccagctgccaggctcgtagccgtcgaagatcatcggaaggctacgggcgcggcgccggatgagccacttgaggccgtacattgtcggcatcttggacacgtcgagcttcttcagcttgaatagcagatagccaacaaccaggacgctggccactgatctaacgacgcggttcctcgccaacgccggacaccacttcggaaatcggccccaacgcagcagtatcagcagtgcaattgcgacaccttcgccgtacggacggtgaacggtcttgggcgacgtagtgatgcttagcaagtgcagcttgtccatgtgctgcagctcggcgttgcgcgagatgcggtgctcgggcagcgtaccgtggacgaccagatcccgcgacgagttgaccgggccgttggccagcagcaagtccctgagcgagtacctgctccagtggtccatgtgcagatccgcggcgttcttgagcatggggaacttccaatacagtttgatccacgagcccagcacgatccccagcaagtggacgggtcctccgtgaaccacgtggacgccctccatgccgatcaagtgggtcagcgtggagcccgtcaggggcccagcgatgcacgtgatgctggccacccacttgtgcgagctgccgacgccgaagaagtcggcgctcagcatctggaacagctcgatggccgtcgtggacccaaagctgtggcccagcaagtgtacggggttgtcctcgctccagtccgggtgcagcggcgtgtcgaactgctccccgtagcggtcgtggcctaaaacgcgcaaaaatgacccgttttcaatgggaatttcaggcatctcgagctctaatagcactgctacctgtgtctttggagtgctgctcgccgtagtcaacgcggccccccaccaattggtagaacacctcgcaggcccgatcgtggtccgaggacacgccgccgacgtccaccagcaggtggttggggttgacgcgctgcagctcgcgctcgggccagtacgggacccagtggccccacagcggccgctgccggccgaagccgaagacgcctgcacacaacgcacgcaaattcaatagaaaaagaggctcaaagcgtcaggagatggctacagtacactggtgcagtggatagagaaggtggggcttcttaccgtggatgaggacggcggggaacttggtgcgcgcgctcatggggcgctagtggcgacgagtgaccgacccgggagaatgatctgtgtatcccaacttcaacgagtccgccgtgaagcgccaaattgaccaatcagcgggcttgaaagttgacgctggggtgtcaaacagatactgtggccgtagcaagcactgcgaagggagggcaggaaaaaggtaagtaagcgtgtaacaaggcgctcttcaagttttcttcccgcttgtgtgaggttatcatgccaatcaggcgtacagaggtcaaagtcgctgatcgggttgtcggcatgccagcaatgctgcaaccacagcacttcctaccgctaaactgtatgccagagaaggctacagtagttctcctcgtcctcgtcggtttcagtacacatgtactgtcatcaccatttacaagttaacggcgtttgccacacgacctgttacctcgcttcatttgctaagtttgagagccatcggcaatacctcggcagatttcactctgcctgcaatgtggcaggactcacgacggccgagaagagctctacttggcagcaattggcaaagctgcgcggcaagaggcacgcgcctgctgtctgaaaagagacagccagaggccgaatccctcggtttacggcatctgtgatgtacctgatcgaaatttataatctgctgaaacaccacaatcatcgtgccactattttccaggtccttaaagcgagtctgcagtctggcgtcatgctggcctcatcgttgccatcaccgccggcaaacccgcgggaaaactcgcaacgttaataatgcgatcgccgcgcgaaacgttatgccgtcgcacgtcgaaagtgagcttacgccgcggccgatctgcagcaatcctcgccgccacctggtatcagacgaagaggcaatgtgccgtgagactccaaggatatcctctcggggactcgtctttgcccgctttatcggccaatcacggcgcgtaaatccctttttgcgccaatcgccgcgctcatatgattcgcacttagccgagtttgtctcattaccgctccgttatcatgttcattccctccctgtagttctctaccagcagcagcggcgccgccatccctccctcagtcgcggactgactgctgccattagccgccatggacacgcccatgcacgccatcaacgagtccagcctcatgctgggcaacgccacgggccacgcgcaggtgctggggctgccgctcaactgggtggagacgaaccgcgcgctgagcctgctgctggccttcgcgtgctgcgtggtggccacgctgctgagcgcctacaacatcgtgcagcacctggcgcactactcgcggccgcagctgcagcgctacatcgtgcgcatcctcgtggtggtgccggtctacgcgctgggctcgctgctctcgctgacgttcgtgaaccaggcgctgtatttcgactcgatccgcgactgctacgaggccttcgtggtctacagcttcctggcgctcgtgctcagcttcgccggcggcgagtccgtctgcgtgctcaagatgcagagcgagcccgacatccgccacccgtggccgctcagccgctgcttcgagccggtggggcgcgacggccgcctcctgcggctctgcaagcgcgccaccatccagttcgtcttcatcaagcccatcttcgcggcgctgtcgctgctcatgctggcctgcggcaagtaccacacgctcgcgtaccagctcatcctcgtcgtggtctacaacatctcgtactcggtggcgctctacggtctgtggctcttctacctggccacgaggcacatcctgcagccgttcaaccccgtgctcaagttcttcgcggtcaagagcgtcgtgttcctcaccttctggcagaacagtctgctggacttcatcccgggcatcaccaacgagcagaccttcgcctggaaggacttcatcctgtgcgtcgagatggtcccgttcgccttcgtgcacctgctggccttcaactcgagccagttcaagaagaacctcgaccggctgcctgactcggaggtgctcaacaacatgaaggaggtgctgagtctctcggacatcctggcggacgcctaccacaacttcatgccgtcctaccgcgactacatgctgcagcgcggcggcgagtccaccggtcgtgctcgtggcaagaacaaatcctcgggcttcggcgacacttcctcgtctgaaggcagccccacgcccatggcgcacaacaacccgcgcgtgccgcgctttgtgatcgacgacgaggatgacgacgagatggaggagatcgacctcgagtcgaacgtcagcaccacgacgtcgtcggccgaattgccggcgtctacgaagaacgcgatgcccgagctgaagctgccggccaagaagcaggcggaagccactgaagaagcggacgcggacgtcaccatggccaacccgcaggacgacgaccaagtcaaggccgaagaagccgccctcgaggaaggaaccagcacagcggccgatcaacagacagaagaaggtgaggccccatcagtagaggcatcaactcgacaacgctccagcagctcgcccagtgccgccagtgctcatgaacgcacgcggcacggcgaggacagcgctactttgtagaccgaaaccctgctatctagttagtaaaatcatcttatcgtatcgccaataaccaaccaactttaaaagattgccaggttagctttgtgtcgtggtggctggcaacccttaaaggcacgaaaggcacgaaaggcacgaaacactaacgtactggacgagccaagtgattaagttcaatccaggcgtcaaggaactgagcaacatgcccgcggtccagtcaggtagatcagggtaacgttgttgcagtacccaacaaaattgttgttggcaactcttgctggcaaacaagctgtagtggtgtcctagcagtagcgtagcgtaattaaaactgaagctgcgcgtgctgccaccgactgtcctgccgtatcaaaaatggtcccaatatgggtccactgcctccaaagtctacgtgaatgcccccaagcagagctgccatgtgaacaacgcaatctgtgcgccatcttcatgcgtccttcacgcgtccttcacgcttgcgcgtcctggttgaagtcaatgatgctcaacaaccgtgcaggatctgcactggaactttcctccagggcagccaatcgcagcgcgagaaaagacttctagtccagagacctcgactggatgacgacggcgacgtaaactgggtactttaaaaagggtaactgttcgatcttcaaaggatgggggcgcagaactcatgcgcagcctgcgcgggcagcattcggtggcgttcgctgtcgatagtggggtttgataaaaggcggatgtcgtttacgccttatctccctgaaagtgttgttttgaggactggcatcttttaagattaagataataagaactctattcataatatcatacgcagaacgaatgctgtattatgccgagtatttgtgtttgctactgtagttatgcgttactagctcggcgctgcatttcgatcgatcgctccaggttgggacctacttactgtacttggggcccgactttgatttccctatataatttaggtgctccgacagctaagcgcaatggactcgtacgaaactatgaccttgaaaattaagcagatttgaccctgtatggctggctgccatataaagccgccaactcgcgtgagagatcgtcaaacgttcattaacgaactccgctgcaagtgttcttgcacttgtccgcttcgactaaaatgttgacgtgcattatgaaatagggccatctatttgggtaaatgcccatttcagcttctctgccgactcataattcgtgcgtcatcgcaacgataggacggatactggcggtcttgcgcttccagcgtcgccgccgccgccgtctgcgcagctcattcctgcatttgccgtccagcgcgcacacgcccagcaccaccctctgctcctccgccagtacatcatgggcaccgacatccagaagatccacgtggccaacccggtcgtggagctcgacggcgacgagatgacgcgcatcatctggaaggacatccgcgagaagctcatcctgcccttcctggagctgcagatcgagtactacgacctggggctcgagcaccgcgacgccaccaacgacgaggtgacgctcgaggccgcgcgcgccatcaagcgccaccacgtgggcatcaagtgcgccaccatcacgcccgacgaggcgcgcgtcgaggagttcgggctcaagaagatgtggctcagccccaacggcacgctgcgcaacgagctgggcggcacagtcttccgcgagcccatcgtgtgcaagaacatccccaagctcgtgcccggctggaaggagcccatcatcattggccgccacgctttcggcgaccagtacaaggccatcgacttcgtggccaacgagcccggcaccttcaagctcacgttcacgcccgcgcgcgctggtgccgagcccgaggagtaccacgtgtacgacttccagggctcggacggcggcgtgggcatgggcatgtacaacacgaccgagtccatcacgggcttcgccaagtcgtgcttcgagtacgcgctggagcgcaagatgccgctgtacatgagcaccaagaacacgatcctcaagcgctacgacggccgcttcaaggacatcttccagaacatgtacgagaaatcgtacgaagcgcaattcaaggagctcggaatctggtattgccaccgtttaatcgacgatatggttgctcagtgcctcaagtccaagggcggcttcgtctgggcgtgcaagaactacgacggcgacgtgcagtcggacatcctggcgcagggcttcggatcgctggggctcatgaccagcgttttgctcacgcccgacggcaagacgctggaggccgaggccgcgcacggcaccgtcacgcgccactaccgcgtgcaccagaagggcggcgagacgagcaccaactcgatcgcgagcatcttcgcgtggacgcgggggctgctgcaccgtgccaagctagacggcaacagccagctcaagctcttctgcgaggagctcgaggcctgcatcgtggagagtgtcgaggccggccagatgaccaaggacctggcgctgctcgtccacggagacgccatgaagcgcgagcactacctcgacacgttccagttcatcgaccagatcgccgccaacctgcgcgcgcgcctggccgctaaccccagcttccaagtgtaaggcaggacggcagctcgtccacccactaaatacaatgtaatgtccatcaattcaactgcaaccacttcaacttccactttgcgtttcaacggaatgggtacaatgacacgccgctgtcgacgatgataagcatgtgacatgagatcattggatatttgtatgcgtagctcggggggggggggctgttcactatgctgctgaaatggtgtccttgagggcgtagatccgcagcgcgtcggagacctcgcgctcatccggtttcatgtcgttcagcctcacatttccttaaccaaccatcgagatttaccccttcaacctggtacgagtactttagcccccccgttaccgttttctttctgcgagacccaccgacccaagcttcgctcggacttcgtcctcggtggtggtcaccgggtttttggcgttcgtcactagcgacttgactggcgacaaaaagcccctttcctcatcggtaatttccgcgactcgcagtaatcctgtgtcgatggcgccattgcacttagtgctagctgcggcgaaaatatcgaggatagtggtcaagacgaatactattaagacagtatcggacttttgtgtcacgatgagtgagatcgtgagcgctgctgcaacaactagcaccgcaaacgttgggcgtggggaagcagataaacggagacttgaggccctgacggtatttcacgaagctagggcgcaatagcaaccgcatagcgcagcgtacgacgtactcttcaatgcgtttttactttcttgttgtgaaaaacgtaaggcattcacgaagtcgttatcaaaaatgtatacctagacacacttgaggagtcgtcagctgcaacacgcaacgagattggcctcattcagcgagcagtgcactaagctggctcaagatgcaccgatttactccccgctccattgtattcactgttacgcctgtagccacctcaacggtctcaattctctcaaatggcacgctaaaacaaacattggtatgaactttttgcgcctcattacttggcatgaggcactcgaaaaatgcaacgatcatgcgtgcacggtagcttcaaacttcttcgtagtcacgtagctacgttggaataaagtgtctagaaatcccatggtgaggggaccatacgacaaggagtccccctcgaagcgtacgcaggtacggagtctcccttgccggcaacgatattgtgtcgacagggttgccgaatattgcatttttatatattgcgcctagagcagaccaatagataatcatattggtagagaaaatcaggtaaataaattattatttgccctttctctggtgactaattacaagtgcacttggcttttgtatgagagaatcgaaccgagaaatagattattgatacgggtcttgaaaaccaggtcaataaatatattggaaatatgtattgcaattatttcagcatcaatttatttttcggcatcccgacacccccaaaacagcaaatgattcctactttcctccgacggattccaatgtgtgtgcgtcaactccagcccatggagcgtcgttgtgttggtgcgcacgtccgtcacggcaccagcaagcccttcaaccgcagaaaatgggtacactttgcatccatgtcattctatcgcggtaaaatgtcactttttttcttccgatctgtgttctcacccgccggcgcattctggaagaagccttctgcagcgggaagatgagtgcgcgccgctcgctgagcgacgccagcgacgcgagcgccgacgacgacgagttcctgaacgcggccttcgacgagctggaggcggaggagcaggaggcgctcgtgcgcggcggcttcctgcgcaacagcgacgcgtcctccgccgcctcgtccccgccatccgccgcctcacgccgctcaggagcaacaggaggaggaggcgcgcgcagatccaacgccgcgcgcatgctggaggcgctggaggcgctcagccacgaggcggacgccgagggcgcgggcgtgccgcagtcgctgcgcgggctgctggagcagctgcagggcgcgggcgacggctccgtgctcggcggcatgttccccttctcgcagctgctgggcgtccctggcgggggaggcgcgggcaacgcgcgcttccagcggctgctgacgcagctcgcggccgaccagcccgtgcacgcgcagatggaggcgctgtcggagctctgcgagacgctgtccatgtcctcggaggaggcggtggccgtctcgggcttcagcgtggacgccttcgtgcccgccgtggtgacgctcatccgcctgcccagctccatggacgtgctgctactggcggcgcgcgcgctgtccacgatcctcgagctgttcccgggcgcgggcgtgcagaaggcggcggccgagcaggtgatcccgtcgctctgcgagaagctgctggagatcgagtatatggacgtggccgagctgtcgctgcagatcctcgagcgcatcgtgtgcaaggcggaggccgcgctcatctccagcagcagcagcaacaacaacaacagcagtaacaacagcaatagttccagcacggcgggccccagcgcggcgcagctctgcgcgcagtaccggctggaggtgatccaggagaacggcctcgtggcgctgctgcagttcgtcgacttcttcccgctcgagattcagcgccgcgccgcgcgcatcgtctgccagctctgcacggacttcccgctctcgatggagggcaagatgcgccagggcctgccctacatcaccaacctgctgcgctctttcgacaacgagatcctgcagagcagcttcgcgtgtctgcagaagctcggggagagcacggcgttctcggagaacgcggagttcgcgtccatggtggcgacggaggagatctgcggcctgctgctgaccaagctcacgtcctacgccaacttggaaggctccgcgggcagcagcgcgtcctcgcagttgtcaccgacggggtacaccagcatgctgcgcttcctgtcgtgtctgttgtcctgtgttccgagcgatatgagcgcgtcctcggtcattgcgaccgcgtcacacttgcgcttcgtgaagcttccgcctatcgtgacggcgctgctggccaagccggaagtgatttccgagaaccagctactgcgtgagacgttgaagctgatcattgtggtgctccccattgccgaagaactcacctcgagggacgtgatcccccctgagatgctcgccttggcgcatgcaattttgccgctgattattaaggtctacgacgtgacttcgcgcgctgatttgcgctacgactgcctcggtgtcatcttcagaagctgctcgctgatgcatgccagccagcagcctttcacagcccaagaacgcaccgagttgtccagacttgcagctttccttgcccgtgtactgcgtcctaagcgcaacgactcgacagcaacgtccgtgtctgcgctggttaaggccgagaaggacttcgtacccgtgcaacttgctctgcgaattatcgaggtgcctctgcagcacgctggcgcgcaggaggcagcgacgggcattttcgagcgccacggtgttgcaagcatcatccgcttctacgcgttcagccccaagcaggacgatggggctgaaagcgacttgcaggaaattcaatccacttcagcccggctggctcgcgagtatttcggcaatgagagttcaatcattagcgtgatggctcaattggagggcctcgtggaagagcttcaaacaaaattgacatccaccggctcaaccgaaactgatcagccttcgtcactactcgatgcactactgaagctgcgggactttgttgctcaaggggacgacttcctgacggcacacgagctcgcgtgcagcggtctagtgaaagtgctcattcagattctgtcgagcgatcaaggccagcaagtctttgctagaatgctggaggcgcaaggagatgagggtgatggcgcgggtttcgtggcatcgctgttgcggtgcttgcaggacgccatctcttcggaaaaggacgcgttctcggtttctgtcgcatcgcctgacatggggctttcatcgggtagcgtcgcaactgacttggatcagttgacgcagcacatcaaggttcacgtactgattgaggagacgaagcctgcagcggagccggacaatgaagatcagagcacccaacaggccgactcgcgcgaggagcaggagtcggaagaaacccctcttcgctggatgaagaagacttcgtcgaagcggaatggaagcaactacaagtccaacaagagcacggtgcatgacactgttgtgctcgtggagccccttgctaggatcgagacgatggaggactttattgccgacaagctgtttggcagaggcggaagcgctgagtccattctggatgagttaaccggtacagatgctgagagtgaagaagcggcggaagacgagagcggggagtttgcaaacgatgtcgtgaagccgcggagagtcgtggctacatacaaggggcaggttcttccgtctgacatgagcatccttgaagcgatcgtcaagtttggaggtgtgaaggcggatggtaaggcgaatgtggagcggagtgactcagcgactgcgacttcttcatcatctcgatcgcgtatctggacagcgtcgcctcatgatatcacgttccgagtagctgctagttcttctgaagacgcgagtggctgggagtctgctggcgaggacttgaaaattgcggcagcatttacggccacttcagacgcaggagtatctgtagtgacgggccagtggtgggatgatgtgtgggacttgttgcttttgctgaagcttgtgcgtaaccagtgtgttgggaaatcgtttggagcgccgctcaattttgtgaacagctatctcagtctccaagttcggcgcgcgttgcagcagcctgtccgtgtggttacgaactcccttcccgagtggtgtttccgtctggtgaatgagtttgcgttcgtgctcgagttcgagacgcggtgtcatttcatgtacgcgacgacgtgtggatgttcgagggctattcagtatttgtgtcggtcggtgtggaggaaggccgtgatggaagaaccagccccagtgcaccagactcggccaaccactagtggcggccggcgccgctaccgtgacggatcaagtcgcacgcggacatccggcttagacaacatttctcaaatggtgaagcttccacggctgaaagtgcgagtggctcgatctcgtctcctgcaatcggcaatgaagttggtggcaatttacggtggaaagaaggcggtaatcgagattgagttcctcggggaggtcggtacgggtctgggaccaacgaccgaattcttcacgcttgtctgtcaacagattcaggcaaagcagttgcagttgtggagagatgacgatctagcaagtgcagcgtccgacacaatagacacggagcaaaagcgtgaggcagttggagatgatgcagagggttctaagacagcccaagccaagagctctcttgcgattagagggtaccatcgtgttgcagtgtatcattgttcaaagtgcaagacgctacacattccgagctgctcggtgcaccaccaactgcttacgcatgagaagaaggttgcggacaaggagacctcaagcgaacgcgacgcaactgaagctaaagccaagagcgctccttcttccaagtcagcacggcggaagatctctagaaattcggttccgcagtgcgctcagtgcttagatgaccacgactggcattctgcggctgcggcgtgtgagtgcaagggtgaagaaggcgatgacaagacatcagctggatgcgcactcaagtggtggatcttgagtgacgaggaagtgcagtatctggccaaggttttccctcggcacacgaagaaggtgaaccatccagtgctgcagtgcgcgcactgtgataccgtcaactttcccggaacggacgccggcatcgtggtgatggatggagaccgcatggtttcgcgctcgggtcgccgaatgtttgagcgggattaccgagctgtgactaagcatgtatcgccgctgtgtgagggcacgcctcttaacgtaatgacgtccgcgatcacccgaagcgatgtggatatgctggtggagaacctggcgcagagcccggaggtgctggagtcggaggtggagtctctcaactacctcagtgaagcttcgctcgccggtggcaacgtcggcggcgggccgcctgtgacagctccgtttggtttgtacccgaagccgtacctgaacgacccggcgctggacgaagcgaaatcatcttgtgagtcaagtgattcttcgagtttggaagctgatgcgtcgtctctcagtggggacgaagtggacgtgctgacgtggttccgattcctgggccgctttgtggggcaggccatcctggacgagcggctgctgaatttgccgttcgctcggccgttcctgcgcgcgctgcgcggcgagaagatggtgggcggcggcgtaagcgtggagaagtctctctcgttcgtggaggagctggatcctgccgtcgccaactcgctgcgctatctgcgcgatttggccaccaagtacgcggcgacgtcgggccaatcgtcggcggaggtggctgcgtggacggaggaggtggattctctgtgcctctcgttcacgatggtcggcgccgacgagattccgctcgaggccggcggcgaagacgtctctgtcacgctggactcgctgcaccggtacgtgacgctgaacctcgagttcctgctggaccgaacgatcacgagtcaagtgcaggcgttcaggcaaggcttcgagcagatctgcggcggcgaccggcagctcttccgcttcctgcaggccttcgaggtgcgcgagctcgaggcgctgctgagcgaccgcggcgccggcagcaccatgtgggatcgcgacggcgtggatctgcgtgaacacatggtgtgcgaccacggctacacggccgacagtcgtgcgatcgccaacctcgtgtccatcctgtgcgagctgacggtggaggagcagcggctcttcgtgcgcttcgtgacgggggccaaccgcctgccgctgggcggcctgcgcagcctcgagcccaagctcacggtcgtgcgcaagctcactgaggcgggcgactcggagctgaacgacgccgtgctgccgtccgcctccacgtgcaccaactacctcaagctgccggattactcgacgcgcgagatcatgaagcagcgcctgctgttctgcatccacgaaggccagtgcagcttccacctctcgtaaccagcacaaccagcgacgacgatgataaggggagaggtggcaggcaccttcagcttcagcttcagcttgagcctcggtgttgacggcgatgacgccgcttgttgccatgttggtgcgtccagcgcccagcgtccagcgctggagcgtgccgacgcgaaggtgaccccgtgccagctggcgctccaggctgggttaaatgagcattgattccttcgcgctttcccgcttcctttaccgaatgtccggcgctttccttctatttacatcatggggccagcaagcggccgaaagtgtcgaggtgtcgaggccgcccctgtctgtctgtcggccttgacgaacttgttgcgctcgacggttgaaatgagtgaggaggaaattgagcagaccaagacgttgtagtgagggggataaataaagttgcatgttacagagcttcgcttgtgccttcaggagtgtatttcgcatgtagggatcctatcacttcgaatcgcttgccaacaatgcactacctgccgacctagagtagtaaagtaagtaggtggggtggggtggtctgcgctcgactcgataaataaacaaccaactggcgccgcgcgacttccaggcctcgagccacgtgagctcgaacggggttgtacgtcgcgccggcaagctccgctctcgacgcgacgcctgcagtctgctgggcgccacctgaaggagggaagatcctccgatttccgtctctctctcttggcttggccagacgactccatccgtttgggtccgggccaccacgtcgccaagaggaagaagaggagttccatctcctccaggcccgcgagggggttgcgtcgtttgcttttcttgcgtcgtctgcgccgcctagcagcactcctggctgcggcgcagctcgtcctgcgagtaccagacgcggcgcttgtagtcggcgtcgaagctcgagcgcgcggggatctccaccacgttgacgtcgtcgtcgaagctgatgcgccggtcgtggctgcacgcgcggacgcgcaggatgccgtcgtcctcctcgtcgtccgtgtcgtcgtccgtctcggccagcgagtcgcacgtcgacgtgcgcgcgcgcgccttcttgggcttgagcgcgtccacgccgacggtgcgaggcttgcggggcggcgcgccctgcatggcgatggccatccagtcctcggcgtcctcgtcgtcgctgccgtccgcgcggaagtactcgcgcacgttcacgacgctgcgggtgcgctggcgcatggctgttttgctgttgctttagtgcgggttcgggccctttgttgggggttcctgcgtatctgctgggggctgatgtaccgactgagagctttgagcggtgtgctatgaggcctcgagaggaaggaagagcactgtgtcgccacgagtcctttcggtaaatgagcgtccgagagagaagaggagggcgaccagcaatgacagggccgcgactcggcgacgagacgaccagacgaggcaagttccgacccctagccccgcgttctatttcttgcacgccgcgactcggtttcactatgagctgatgccgtcgcgttgtgccgccagccgctctgggcgctgggctcgactcgtgggccactcgccctgggcagcggccccgctttctgcgcgccggctggggctcggcggcgccctggggaatccaccgccgctcgctgtcgcagtgagtgagtcgagcgcccaaaagtttcggcttggtctgcgagccttcgcgggtgggtgggtggtggtggccaccgttgagctgagctcgagctgctcgagcgcattgtcgtggcccgtggcgcccagcccggaagcgcccggttggcccgtttcgttcgggttgacacggcccgggggatcccgacgcgactgcagccagcaaaaaccaaccaacgcgttggtgccgaagagagcacaccgcttcatgcatgtacttcgtgcatgcgggccgccgcgctcgccgccacctacgctttccaacgccgtgtttttgcaggggccggcgacgttccctccttcctcgtctgcgggcgggcgggcggcccggatgcatgcatcgctcgcctcggcggcggcgtgggacgtgcgtcagtagggatattagcagcgagggcgttcccttccggatcccaaagcccatcggtccgccgccagcagcagcagcagccagccagcgttggattttcaacgcccgaaacactcattgagcgctgcaacgacagcgaaacgagcacggcggcggcgccgttgcccaggcacgccagcgatcgatcgctgccgctgccgctggcgaaagatattgatgatactcgggtagaatcgccgccgcaagccagcccccgtttcgctcgatggcccgtcgactgactccatgccgcgtcgcgtgcatagaccgcgccactggatagcgggctagggtcgagcgtcaccggactcaatcaagtgcttcaactttcgggcccgggacacggtcgccgctatttgggcggagggcggggggggggggggggggggggcagcaagcagcaagcagcaagcttgcaacgctggaaaacttgccagcagccgaatcagctcggaggccgcgagcgccatgagctccgatcggcgtggccggcggcagagctcgcgagcgccgctcgacaatgcaaaaaaaaaatcaaaaattagcgccagcgctacgtgggccatgcagtctgcagtgcagtcagctccgcccgacgcccatggaccgctacgcgggcggcgtcgcccaccgacacgacacgactcggcgagcgcgccgcaacccgcctttggcttccatcgactcgccccgttcccctactatcgcatggtcgagccgtcgtcctgcgggcggagctgagcagcccacaccttctacgagcccgagcccgtctacttcaaaagttggctccccctaatacgagagccaaaagtcgcacaaaacgggctccctcatggtaagtacgagatcaaggagccctggttcgggctccccattggctcccctccagagctccccaaatttagcttcaaatctatgacgggctcttcatagtaatatctgattggccaattttacctagacttaaggcgagcaacttcgcgtgattgatgcgccacgctacaagatcgagctcaaagataaccacactagaaggtctcgcgccgctcatatgtggacagccgctccgaggccaccccagcgtcgccgatcgtccttccttcccctcaaggagaagtcctctttcctatgccttttcaggttagaacctggagatacttcaatgacggccaatcatcagcgagatatttaacacaggtgaggggaagcccttaacgagggctcacagttctggagggctcctttcacttaacctattgacctcaagagcccaggagcccgagctcgcgactttttgggttcacccaagagcccaggagcccggctctccccagggctcgtagaaggtgtggagcagcctttgctgtcttcagcgtgtagtgtacattagcggcgttgcgttgcggtataccatccgctcgacgacagtgcatgcctgccttgccttgcatgcttgcttgaggctcgttgcccgaccggcggacaggccaaacaatatacacggaggatcacgaaggaggatcctccgcgtcttacgctgtcgtcgccggcgagcgcacacatcgcaccggaccagcgagcgagatccggtcgcgcaggtcgctctcttggcctcccccgggcttgcgggcacccaaccccctatatgcacttttgtcacattgacactgccggtctctggtttcgcgcagactcggcttgctctcccctttgcctgcttggtggcgagcagtaacagcaccaaagcacttgtagcaccgcccgcggcgtcgcatacagcgctggctggatgttggggtgatttctttcgcagcgcagcgcgtgcaggaaggagctcgccaacagctggatgacccccgtcggcaatgcgaggaaggaagcctaggctagggctcggcgcgttaggcagcgaaacagcggcttgaggccttgactacccgctggcgctacacccgcgctgtaacggaaccagcggcgtacatcgccacgaaagcgaagaacagcagggcaactcaaacgtgggcagcgccgacggtaacgacacccggttggtgggcggacggacggcttcagcctcaacttctgccacgacggcgcggatgtatgagcatgaataggtattgatacagtatgtagaagaggtcgctccttatcgtggcctgggatccacgcacgccgagagcaaatgagttgaagggcggtcggacggacggcacgccagctccgctctgctctgctctgcgactctccgagctatgcacgcacgcacacggccgcgacgtcgctccggctcgccgagcgcaatgagttgcttggtgtgcagcacggcggcgacgacgacgccatggttgttggggaggtcgaagaggtcgtggggcagatgcgtctacgccgctgtcactgttgctgctgttggcaccgccagccggtgctggcgccagccagctgaagcggcagcggccactccgctcctaccttacatgtagtgacggtgtcgagcggcggtagtggcgatggtcgtggtcatggcaatcctcagcctgccgagcgccgagttcaacctgcgcatgcttcgagttggcgagcggtagcggggcaatgaacgcaaccttcggtcagaaatgggccagctcatctttgggactcgtcacgacggagtgattgctccggaagttgcctttttcggctgcaggcaccggacgcttttttcggtgcatcgttcgttcgggggcaaacggggtgtgcatgttacaaacgtgttatgtctactgcgagttaaataggccgcgcgcggggtcacacagcctcagagcgccgccgcgcgagagaccatctcgacgagctcgggtcggtgctgtagcagctcgcgagcctcctcgaggcagacctgttacacaacaattcattagttgctattggtggttgcaatcttccagcacagattgcattgcccacgtattattatcggtagaagctgttgttgcacggtacaaccactatcgaacctggtagcttctagacgctgggaaatacgcatgcccagcagcagcaataatacgtagcgtttctacattgcttcacgaggtctgaaaaacatggacactgttgtgttgggggcgcaccagtagtgcaccgtggtaggcattttcgggtcgtacgtatcctgcgaacgtgaagttaatccattgggtacaaaaggcaatcatccagggagcgtggcccacgcgccattgtgccactcggcgtggcacaggcagaagcaacgtacaggtgacttactaggggtgctcaattgaagtgctcagccccgacacgagatgcacaaatcatagcagcctcgtcaagctacgtgtaacgggctaactgcagcccgttacatgcttacacaagcagaggaagtagaaggcaaattgaactctggtattaagggccgagacggtctcggcactcgagaccgtcccagccattaaacctataatgggctctgattggccaccgcgcacacgcggtggcgcctgtgtgacagtggcctgtcacaccaccccctactcaagattggaacatacacatatctaaactctagaaaggaactgcagagcttcgcgaggcggacgtgacgctacttggcaggcgcgggccgacagcgcgcgcgaagtgattgaagcagcgcagcagtgtctcggacgtcatcaagggccggctgctgcgcgaccgcagcagcagcgtgggcttcaacggagcgatcttggtgcagctggtccggcgctggcgtggcacgaagcgagttcgtcgcggtggtacgtaccgtgacttcaccgtgggtcaggtcgccgcgaatcctggaacagcgaaggtcgtccgtcgtctgaagtcgagcatcgccgctgggctgtccgcacttacgaggcactcgttgagttaggcacggctcgccgccgcgccctctgcaagcgacgtctcgtacgccgccatgcagtcggggacatctgcgagtaggacctcgcgtggctcccagctgtcgtccatcgggccaagccatcgaaccagataccggcggtgcgaaggtatctctccatcgcggcgacgagtgccgcgatccgtgcgtgcgcgctgcggtgcatctcggtggtcgtcgtggttgagaatggcttcgacaatgtgacgctggttcccagtagcgtccactaggggagcaggaccgtcgcgctggaatgcagatgcgcgaacctcgggcagacgctgcgatggcgcagcgtcatgatcgacttgggcatggtcatcggcgccgccgggaatggcagcgggatggtatcgtcgcagtcggccaacgtagaacgtagggtgcagccggagtgccgtagggagctgcagcgtgtaggcgtcaccgagtaccttcgtcactttaaaaggtccaataaatcggggcgcgagcttgttcgcgcctaagttcgtcaccaaacttggcgacatgcccgtcgtagagagcagtacccgatcgcccacggcgaacgtctccagatgtcgtcgccctcgtcgatcggcatattccttttgccggtccaccgccgccgcgatggtgtcgcgtacataacgcacaaccgactcacgtttctgcaggaagtcgcggacagccgcagtgtcttggggctgcggcgctgggagcggatcgaagttggcaggaaccggcgcggcaggtgtcgccgcctcttgcgcgtcttgatactcgacggcccgacgtggcatcgggtcaatcagcgtgcgcgaagtccaagctgcgatgtccgaaggtgccgccctcctagcggaacgtgtgcgcgaagatcgttcggggttagcgcgtggtctctcgtgtgccgcccgcgtggcggcacgtgtgcgcactccgactgctggagcgttagagccttgacgagtggtgacgccatgtaacaacgcggagacagcgtcggggatggggccacgacgatcagcttggcctgggtcggggtctacagcaatgtcttcatccggaacgagtgacgcgggatcgcccgcgtcttcagcagcgcgaccagccggagtctcagagcgctccacaccaaggagcgctggaacgcgaggatggcgaccgaggttgacgaagaacggggacagcccggtcgatgtgtggacagcgttgttgagggcgaattcgaccaggggcaggaaggtgctccacgacttgaacgacgtagcgaagctgcgtagtatgtcttcaacaacacggttggcgcgctcagtttggccgtctgtctccggatgcgacgcggtggacatgcacaaccgcgtccccagcaacgggaaaagctctcaccagaaagcagacgtaaagcgagggtcgcgatccgatacgatggaggacggaagcccgtggtggcggtacaccacgtccacgaagatcgcggcggtttgcttcgccgtgatgctggcagcaacaggagcaagatggagcatcttgctgagccgatcaacgaagacaagcacgccagtgcgcccttgagtgtctcggggcagcccgaagacgaagcccatgctgacagacgcccatgcgtctgtggcgactgggagaggtcgaagcggagcctgcttggatggattcggcttcacgcgttggcacgcttcgcaagagcgtacccatttccggacccacttgtacatatgcggccagtagaagtctctggacagcgacgcgaaagtcttctcgcgtccgaggtggccgccgctcgacgtgtcatggaactcgtggatcagccgagctcggagatcgtcgtccagaggaacgacgatgcgcgggggatcttcacggtcgacgcggtatgtgagcaactcgccgtccagcgagtagcggttgccgcgggagcggctgcgtggagacagcttgcgcttcgccacggcaccagggtctcgcaggaactggatctgctccgagcaggacgcgtcctccttgtacgcgatcaagtcacggagcggactggtcgctgcaacctcaacagcagcgacgtcttcggcagtgcatacggcgcactcgtcgtcgtcctcgtcaccaactgcgtggcgacctgactgcatgtggtcaggccgacgcgataacgcgtcggcgaggatgttggtcttgctcggcttgtagtgcacaacgaagttgtactcggagaacagggacaaccagcgcgccatgcgctgggacaagtgggggctcttcgtcgctgtccttaacgacgcgtgatcggtgtagatcgcgaaggtctgctcgccgaggagatacacgcggaacttgatgagggcgtagcgcatgaccagcagctccttatcatggactggataattccgttccgccggcttcagctgacgcgactggtagctgacgacccgctcgcgtcgttcgtcatcgaactgcatcaaggcgcatccgatcgcgaagtcgctcgcgtcgcacacgacatggaagggtttcgagtggtctggaagcatgagcacgggcgcggtggacaagctcgacttcaccgcgtcgaaggcagcttggtgctcgggaagccacgaccacatggcgtctgccttcagtagttgagatagcgggcggatcgtcgaagcgaagttcttcgagtaatggtgaagatacgtggcgagccccagccactgccggagctgcttctggtcctgcggcgtcggccacgcgcagatggcctcgatcttctcggggtcggcgcggacaccgtccttgctgacgtagctcccgagcacagggatctcgggagcgcagaagatgcacttcttcaagttggcgtacagcttgttctccttcatcacctcgaacaccttgcgcaggtgttgtaggtggacctcaacgtccgtcatgccgtcctcggcacgactgtgaatgaagatgtcgtcgaagtagctgggcgcgaagtctcggtacggccgaagcaagttggacaccatccggttgaaggtggcgggggcgttcttgagcccctgcggcatcacgagccattcccacaacatcccgctgggcgtgctgaccgctgtcagcggcacatcgtcttcgcgcatcaagatctgatagaagccatccatcatatcaatggcactgtacttcgtgctgccagacatggtgtccaacaccatgtccttcctcgggatcggcgtttgcgccggtatggtggcctcgttgagcttgttgaaggcgtggacgattctccagccgccggttgctttcttcacgcagaacgtcggactggagtgcggcgagagcctctcgcgaacgtagccggcttgccggcgactctcgaagaaggcgtcaatagtttcgacttggtcgcgaggaagtggccactgccgcgtcacgcagtacttcgcaccgggcacgaggtcaatctcgtgccgaacaccgcggtcgggtggaagaacggctggaaccttgtccgggaaaatctccatgaattcgcgcacgagcagagcgactgggttgccggtcgcttcgagcgccggcaacgactgagctgcgtagcgggcttgatgggcgttcttcggctcggctccttttgggcgcgtcctggcgtcggaagctgggtccgtcgcactggttgcgacggccgtaattgattcggcgtcttcggcggcgaccatgcacacctgctcgatctcgcccttcttcaggtcacggagaaagtgtttccacgagagcccaggcagccgagtgatttcggcggcgttgcacggtggacgtgcgacttcgacgtcgcgtacacgcggagccgcctccgcgtcgtcccccaccaggactgagatcacttcagcctcagcctcaaccgagtccgccgatggcgtacgaggacggcgcggattgcgacgtccgcgacgtcgaaccggacgtggagtgtggtgtagtagcacgcacaaaatcgtcagatgtggcaccctagctacaaacacaactacagccgagctagtcggcctttgttagcctgcgctgagatgtcccccagcggttcggcccttccgggacggtgatgtctcggcctcgccgaggccaagtaccccaagccagtcaataacggaagtcagctgagctacctgactccggaattagaaatcccgtgccctccgccaaaggacggacgacggccctcgcgggcttttacgggtcgccgagagcaaaggcatctcgactcagcaatcagtgcccgggacgtacgggaacaccgactcgcagcggtggcgaaacctttcctccgcgcttggcgagacacgcgcccaacccgggccgaccttaatctcttggcgctgccagccgagtaccctacaagctatgcctctcaggtaccggcagcagacataatccggccccgtgcagggacttaccggaacgtgtacacgtgctttaggcctagaaaattctgctctgatgtttgttatctctgtcgggcgccctgaaggggcgcctccactattcctaagctcctatacaaataccaaatgaaagtgggcggttttggatctcggccgactcttcaccgagctcggcgacgcttgaagtcggctaaaccggataacctgtccggataaccccttgaactcggctgagccggatacggcgtgtccggataacctagcgaactcggctgagccgaataagatgtccggataacccattgaactcggcggagccggataaggtgtccggattacacgacgaactcggcggagcgaccctaggacttgactgggcgactcccggactcaattggacccggttaccgtatctggagggcacgtggtgccgtttagccgagctcggcggcttgaactccccatgatctcggctgagcgtgtccagtgccttcctgaactcggctgggtcttcatcactgggtctgccacgtgtcaccaggtcggggccggtgtgccttgagtttctgacaccatcagccgagttcagcggtccatcagcccactgagctcggcggacggtcatcctgccgaatagtacttggctcctggtacgttgttccactgcggccttggagtgtgacacaaaacttgatgttccctacaccagaactgtcccggccatgctacgagccggagtggtgagtggcctggccaaccggatgtgtcgcacgcttgatttcgtccaatcagatctatcgcaaacactctgagttcacatttcccgaattcgagtggcgagaaacgcccgcaacgccagcttgacgccctcgttccgtgaaggtcagacttgcttgagccttgatctttggtatagataggccttgtctgatgcgtggactccgcgcctcatgggtctgtacacatgtaggtgcccctatcgctcgcaccaaaccccgtcgtcgggtcacttcagcagcgaatcagcctggatggtcgtctcggcgtggcagccggtggcaggaactgaaccagacgaagtcagctggtgcccctgtcgaaggttggagtactaccggtgatgttgggcctgccgcagcaaagcaagtaggtgatgcaggtgtcggggaagtgctcgatggctgcaataccgacgaagccgagcatcgctgtctccgtcaaaatgagcagccatggacgctgccagcgactcggctgaccaggtaagcacgtgcctctcgtttcggtgcgtcgagtggagcctgatagtagtcttggcacgctacaaggcaccgggaactcggcgggtcaagaaacgcttccccgatcgggccgcgctgagctcgaaatccaccccagctgagcttattggcgagaagtgcagcagcaagttgaactcagctttgtccgaactcggctgtcctgacgactagctgctatccgctgaccttgaactcggctggacttgaacacaacctccgcttgatcggctcaactagcctggtaagtgtttgccccactcactttggtgcgttgagttagctctcaccgttgctgtgtcattttatagccgaacaaggcgatcctgatgcgtttgatgctccagtcgagttgttctgaacgggccgagctgggttcagtggtcaacggaccttgacttcggcatgtcccccgctctgttagaccagcttaccccgactgggctcagcttggttgggatggtggtgggcaagctcgactggaacagcacttcattcggtcacattccaactcggctcgccgcgagctcggctgcgttcaaactcagtttgaattcagtctctttggttcagctgtgaagcgtgttcagcctcagctcggctacacctcgaactcggcatgagcgctctccaatcggaacatggtgcgtttaccagcactcaactgggccctgctgctgatagggacgtgggaacccatgctcgaccacgtcagacacgtcctgaggctcctgctcaggaccggcgcaggttgcgagttcgcacaccgcacacgaagggccatcgctcgcttcgtgcgcagcatgggtcatggagtcggggtccatgacggcaacatgcggccattggttaggcgttccgcacaggaacgccaatactgcatttacatcaatgtctcgggggcggactgtgccagtcagccagttgatctcaggctggtggcgggcgagccacgggatgccgaagacgaccggctcagctcgatcaccaagaactcctcagaactgtggaacccgtcgaactcgtacgcgaaggtcgtcgagcgccgcggcttcccatcagcgtacttcacgatcatgtcgccaggcccgtcgcgaatgttcatgtccgccggtaacaccgacaagctctcggcgcgaacgaagttgttcgtcgcgcccgagcccagcagcgcgcgaagagggggcgtcgcgccgtccacgtggaggctgagcacgatcagcctcgtgtcactgccggaggtagtggcaaagagttgtgcatgaaccacgggagggctaggaggaggttctgccaccagagaaccatcgctccttccacatccagtagggcgccccgcacctactggttgtcgccgtttttttggaacggcgacgtcgtttgcgaccgtgacgttcgcctgcatcggcgccggagcgcgacaaatagcggtgcgatgtccaggtttcccacagcggtagaagcgcatcgggcggggactgcgcgttgacgagaccgttggaggccttgctgatgacgtcggcacccgacgtccaccgaactgttgaatcgcatccacctccatcggctccggatcgggcactggagcccgagagacatcgaaagcctgcgacgccgtcacactgtagtcttcacggagcgcaacagcgaaggcctcttcgagtgtcggtggggtcttctgggtcaggtagaagcgctggtagccagcgctcatgccggagatgaagacgtggacttgggtcgccatgtctacgggatgcgtcgtgatgcacgacacaaggtgtcgtgcgcgctggatgtacgcaagcatggacattcgtccttgcttcaacgccaggaaggcggagcgctgaacgctttcatcttggggcggctcgaacgggagtcgcaagtcagccttcatcgatgtcatggtcgggaagcaggaagcgtcggccacgagcttgccgagcgcccactccttcgccttccccgccagcttggacaggagaaagcgcgtgcgcgcaagctcggtagacagctgccgagcttcgatcgcgatgtccacctcgcagaaccagcggttcaggtgaaggcggccctcgccttcaccgctgtacgtggagacatcgagcttcacgatgtcggacttgttcttggtctgcgggagtcgacactcgctgacggaggtcagcgagttcacgccccatgaactcctgggcggccaggcgttgttgctcctcggttcccgccgtcagcagtgtcttgatcacagcgtcaccagacaccgctgcgaggcggtgtagcgcctcccactcgatcgccgacaggtgaggaaagctggcgtgctccagtgaagtggcagtcgtccggggcgcgtcaggcatcgacgtgtcgttcatattcatcacgagcttgggcgttggacggattagcgaagtactaccaggtgtaacgggctaactgcagcccgttacgtgcttacacaagcagaggaagtagaaggcaaattgaactctggtattaagggccgagacggtctcggcactcgagaccgtcccagccattaaacctataatgggctctaattggccaccgcgcacacgcggtggcgcctgtgtgacagtggcctgtcacactacgggccaccagttggaacctatgcgaaggcctttggatctattcgcgctgtatgggagcggtgcccatacggtcaaaatgattcgatatggttcgaggaagtctacatattcaatttccactttggggcggtcatgagatcaagcttcttctcactgaaatatttcgtgcgcgaagactgtaaacctcacacttcattcacctggtaggttgtcgcgatgctgccgagactttcgatatctaagctcgaggccatggtaacctagttgagttacagtatctttagccaagtcgcgccctgtacaatgcggagacataggcgagaggcaaactgggatgccacacttattagagcgaagtggcaggactgtcatccttaggagaaacggcacaaccacagttgacaacgcgtatgggtattagcttcgggtatttgttgatcagtaggtatcagagccctaaacgaacacaatataccgcactatcaaaatggaaatgaaatgcccatttcaatgtgcttatgggccaccccgataaaaacttggagccttatcgtgactacattgccctcgcggctgcacgtactaagcccgatacccgtatgaatggcggtgcgcatgtttctcttgtccaggagatttttagattctcaacaaaatcgacatttttcatattcttacggtaggaatcctaccgcgggtaatataagccatcggcgcgcggtgccgaggcttcgaaattgcaaccaaatcaaaccaagttgtatggtgcttgagcgcaatcgctatcttctcccacgaccctttttacttctcatcggcctaccgagcgatagcagccaaactagaagccttgagtcgccccagatatgataaagcgttgtcgaagccgcatcagccgcgatagcacaagcttttcgaggtgaatttcaaatgaacgaggacaacacgtgtctctttgaagggatacaatttaaatggtatcccttgcaatgttgtatccaacgtaaagttattttaataactttacgttggatacaacattgccccagtcgcgcaacaggctgctgagccccggcttaacttcaccacaagtacgtgtggtgcttcttggtctatgctcatgaaccttgcgtccttaaaaagcagacaacggacaaatatgcagtggcgctgctgcaactggcaactggcggcgaaagtcaagtacttgtcgaccgaatgaaccgatgtattggcacgcagggacgtcgaaagcgctttgattctgcaacaaccgaaaagcgctgtaattctgcaaccgtcgactaaccaagtagtccttagataagcattagtttccgaaggttttaatgagccaaaaattcatttactgaaaacggttttgacgggtattagttattttaatatgagacaaccgttactttacttccgttacgcgccagctgcttcagaattcacgctgctggacgcaggctattcctgctccgccaagctgccatcgccgcttccagcgttcccccttaataatcccgcactcctccacctactcctgatctctccgcgccctcgtcaccatgactgagagcccagccatcgacagtgagcgcccctcggacgccgcggaccccgtgctgcagcccgcgctgtcgccacccaacaaacggagccccaccggcatgcacaaggagctgctcctcgacgacaagcgcctcgccagccgcctgttgcagtcccgcgtggggcgcgacaagcagcgctatgacggcaacacgcggctgctggcgtgcatcgtcgtctcgcgccgtcaacgtggcgctgctgccgtcgagttcctgctcatctcaagctccaagcacccgacgcagtggatcctgcccaagggcgggtgggagaacgacgagtctgcggcggagtgcgctctgcgtgaagccgacgaagaagcgggggtgcgtctgcctaattgtctagtcgagcgtctcggtgtccgttcacgtggttctaactgctctatggttgttgtggttgctgcaggtcacgggggacatcgtgggcgaactcggcacgctggacttcgccagtcagcagggcaagccgtgccgattctacggcttcaagctggccgccacgcaggttttcctcgactgggccgagaacacccgacagcgcaagtgggtacgttcaatagtcgtttggctgtgctggaagattgcaaccaccaacagcaactaatgaattgttgtgtaacaggtctacctcgaggaggctcgcgagctgctacagcaccgacccgagctcgtcgagatggtctctcgcgcggcggcgctctgagcctgtgtgaccccccgcgcggcctatttaactcgcagtagacataacacgtttgtaacatgcacaccccgtttgcccccgaacgaacgatgcaccgaaaaaagcgtccggtgcctgcagccgaaaaaggcaacttccggagcaatcactccgtcgtgacgagctggcccatttctgaccgaaggttgcgttcattgccccgctaccgctcgccaactcgaagcatgcgcaggttgaactcggcgctcggcaggctgaggattgccatgaccacgaccatcgccactaccgccgctcgacaccgtcactacatgtaaggtaggagcggagtggccgctgccgcttcagctggctggcgccagcaccggctggcggtgccaacagcagcaacagtgacagcggcgtagacgcatctgccccacgacctcttcgacctccccaacaaccatggcgtcgtcgtcgccgccgtgctgcacaccaagcaactcattgcgctcggcgagccggagcgacgtcgcggccgtgtgcgtgcgtgcatagctcggagagtcgcagagcagagcagagcggagctggcgtgccgtccgtccgaccgcccttcaactcatttgcactcggcgtgcgtggatcccaggccacgataaggagcgacctcttctacatactgtatcaatacctattcatgctcatacatccgcgccgtcgtggcagaagttgaggctgaagccgtccgtccgcccaccaaccgggtgtcgttaccgtcggcgctgcccacgtttgagttgccctgctgttcttcgctttcgtggcgatgtacgccgctggttccgttacagcgcgggtgtagcgccagcgggtagtcaaggcctcaagccgctgtttcgctgcctaacgcgccgagccctagcctaggcttccttcctcgcattgccgacgggggtcatccagctgttggcgagctccttcctgcacgcgctgcgctgcgaaagaaatcaccccaacatccagccagcgctgtatgcgacgccgcgggcggtgctacaagtgctttggtgctgttactgctcgccaccaagcaggcaaaggggagagcaagccgagtctgcgcgaaaccagagaccggcagtgtcaatgtgacaaaagtgcatatagggggttgggtgcccgcaagcccgggggaggccaagagagcgacctgcgcgaccggatctcgctcgctggtccggtgcgatgtgtgcgctcgccggcgacgacagcgtaagacgcggaggatcctccttcgtgatcctccgtgtatattgtttggcctgtccgccggtcgggcaacgagcctcaagcaagcatgcaaggcaaggcaggcatgcactgtcgtcgagcggatggtataccgcaacgcaacgccgctaatgtacactacacgctgaagacagcaaaggctgctccacaccttctacgagccctggggagagccgggctcctgggctcttgggtgaacccaaaaagtcgcgagctcgggctcctgggctcttgaggtcaataggttaagtgaaaggagccctccagaactgtgagccctcgttaagggcttcccctcacctgtgttaaatatctcgctgatgattggccgtcattgaagtatctccaggttctaacctgaaaaggcataggaaagaggacttctccttgaggggaaggaaggacgatcggcgacgctggggtggcctcggagcggctgtccacatatgagcggcgcgagaccttctagtgtggttatctttgagctcgatcttgtagcgtggcgcatcaatcacgcgaagttgctcgccttaagtctaggtaaaattggccaatcagatattactatgaagagcccgtcatagatttgaagctaaatttggggagctctggaggggagccaatggggagcccgaaccagggctccttgatctcgtacttaccatgagggagcccgttttgtgcgacttttggctctcgtattagggggagccaacttttgaagtagacgggctcgggctcgtagaaggtgtgggctgctcagctccgcccgcaggacgacggctcgaccatgcgatagtaggggaacggggcgagtcgatggaagccaaaggcgggttgcggcgcgctcgccgagtcgtgtcgtgtcggtgggcgacgccgcccgcgtagcggtccatgggcgtcgggcggagctgactgcactgcagactgcatggcccacgtagcgctggcgctaatttttgattttttttttgcattgtcgagcggcgctcgcgagctctgccgccggccacgccgatcggagctcatggcgctcgcggcctccgagctgattcggctgctggcaagttttccagcgttgcaagcttgctgcttgctgcttgctgccccccccccccccccccccccgccctccgcccaaatagcggcgaccgtgtcccgggcccgaaagttgaagcacttgattgagtccggtgacgctcgaccctagcccgctatccagtggcgcggtctatgcacgcgacgcggcatggagtcagtcgacgggccatcgagcgaaacgggggctggcttgcggcggcgattctacccgagtatcatcaatatctttcgccagcggcagcggcagcgatcgatcgctggcgtgcctgggcaacggcgccgccgccgtgctcgtttcgctgtcgttgcagcgctcaatgagtgtttcgggcgttgaaaatccaacgctggctggctgctgctgctgctggcggcggaccgatgggctttgggatccggaagggaacgccctcgctgctaatatccctactgacgcacgtcccacgccgccgccgaggcgagcgatgcatgcatccgggccgcccgcccgcccgcagacgaggaaggagggaacgtcgccggcccctgcaaaaacacggcgttggaaagcgtaggtggcggcgagcgcggcggcccgcatgcacgaagtacatgcatgaagcggtgtgctctcttcggcaccaacgcgttggttggtttttgctggctgcagtcgcgtcgggatcccccgggccgtgtcaacccgaacgaaacgggccaaccgggcgcttccgggctgggcgccacgggccacgacaatgcgctcgagcagctcgagctcagctcaacggtggccaccaccacccacccacccgcgaaggctcgcagaccaagccgaaacttttgggcgctcgactcactcactgcgacagcgagcggcggtggattccccagggcgccgccgagccccagccggcgcgcagaaagcggggccgctgcccagggcgagtggcccacgagtcgagcccagcgcccagagcggctggcggcacaacgcgacggcatgcgagtcgcgcaagggcggaacttatcgtctgttcgcgctcgtcgctgtgtcgcgtcgtcttcctcctcccgctcaaagcgacgttcatttcccaaaaggactcgtggcgacacagagctctccccaagcaccaggaaggacaagaactccacctccatacccccaccttctgataccaccagcaagtatgcggcaacgtaccaagagcgtcgtcagcgtgagcgagtacttcggcgaaggcgcgtccgagcaggacgacaacaacaacagccagccccagtaactcaaccggcagtcgcaaactcggcgcactgaatgaagctggggctacctacgccacgtcatcgacacctgaacctaaacaagtcgcgcgtatggattcgtggtcttcgctggagccccagcgaactgaagctgggcgctctcagtgcgctgcatctcggtcggcgctgtcctcagagcgcgggcagcgctgggccctctacaaagtacaattaactagctgtcactacgatgacgagaactgcatggatatttagtgagaataatacaacaacttgaaagtttgagaagctgctttacgagttgcgagttcgtcctcttcctttgctgtggcttccatggttgcgtcgtgtaagcgctgcagttcgtttaggcgttgagaagaaattgtcaggtcgttgcaggttggaatcaaggcgttcgtggcgttgcggtctttacgcaacgcaagggtgaactcagccgagctgaaggggccagttgagcagttcaacttgaaccccgtcgttacgcggtagttacaccgcaaaaaacgtcgtcgtgagtttgttcgttcgtgtgctcggtcgctgagttgaagcgattgtagacgaaccgggctcaagaccgagtacatactatcatacataacggcggcagtgcgcgtagtgtacgagcccgaagatgaattgcaagtacatatacgatgacagttgttgatcgaggattgaagaagaaaaaatacttgccttcttcacacgtcagccgtgagtcacatgtcacggcccgtgacatgtattttgtgagtaaaactggcgaacgacttgtattttgtgagtaagggggaacagtacaaccgatgatcgagctttcaggcaattccataacttgcttcaatgctagccaaaagtctgcccaccgtttacaggtgctgcgagcgcagcccggccgtcgcatcggtcgtcgacagctccggcacgaacggaatcagcgcgtcgatatccgcgttgatctcgggcgtgatcttgtccacggcctcgatgccccaacgaagttcaaggctcgcacagtctcctcgatgggcgtgaacgggtccagacggtggcagaagatgatgtccacgtactgctggtcgagtctcttgagcgaggccttggcgccctcgacgatgtgcttgcggctcaggccctgggcgttcgggccgtccttggaccccaacggcttgaacccgaagaagatcttggtggagatgacgaggtcctcgcggctccacgtgccctcggcgacgcccttgttgatggccgcacccatgttcctctcggccagacctccgccgtacgcctcagcgttgtcgaagaagttgacgccgtgctggaaggccagcttcatcatggcgtaccaggtgtcggccgtgtactggtcgttgacgtccatccagctgccgagcgagagcttggagatcagcagaccggagttgcccaggaagcggtaggtcatgcggttggacttggcgtcggacgcagcgagggccatggtacttgggggtgttgggggtggaggtgggtaggaggttgtcggtgaattccgaaatgagctcgaggttggcaggcgaccgcgacgccggactcagctcttcgtgcaacacagggatggttgattacgacgtcacttgaagggattacaaggacactggtcaagtaatctatctatcccggctcatgcagcaatcggcttcaagctgtacactctttaggcgaatgaaggctgataccagtattgagtacagatggcaccgtatcgtgacgaagggatggatcactagtagtagaagagattttatttggactactatgatagccattaaaatcctaaagaagatttcatcatcaccactaatggcgattctcttggtagctgcatgctgcttacccgtacttgtcctggttgttcaaggattaataaaaaattcctccatcaagttgccttgttcaaccgtttgtggactcatcttgtccctccttgctattgccttcaactgacgaactcccgtcacccggaactcgacgcaactttgctctaccgatgttggagtaagcaaaggtgttgcgcgaccatcgcggattggagatcaggaatctacactaggccacggaaagcgttggctcgaggacggaagcgttaacagcagaagtgtacacaagacgaccagccaggacgctacaacacggcagcaggagacgagcgaagcagttggagaccaaagaagcagctggataaaacgaccaaggacgaagcgatgcgatcttgcaggtaagttgagccaagggacgaaacgtgcggcagccagcagcagacacagatgatcgcgccgcgaggcgccgcggtggccataagatcgcgctgtgaggcggcgtggagctcgtgcagagggtcgcgtgccgaagatcgtatcgagcgagtggcgccgagacgctgctgggagtggcagagcagccagttgaagatttaccaagttggtgacaagcgcgagcaagtcacctccagcagccagaagaagcctccgtcggtcgagacgttgaggcaggaggaagcgatcgtaaccaagaaatacattgattgacaagccaagtagccttacttctgttaccagcgcctgcgtcgcacgcccacgagtggttcaagtccacagctgagagtgacgggtttgagtccctgggcgggttcaagtccccggctgacggcagtgagttcaagtccctggacaggttcgagtccctggagagcaacaggtcccagccccgaggcacgacagcaggatcaagcccttgagcgggttcgagtccctgcaggccagcacaccgggttcgagtccctgccaagcaacaacgggttcaagtccctccgtgggttcgagtccctgcagagcagcgacgggttcaagtccctcagtgggttcaagtccctgacgcagagctccggttcaagtcctgagtttagaggacgtgtggtgcgcctgggatatcgactggtgaactctgtcggacgttgtgtgttactcgtgagaggagctggaggacctcacgtgcaatcagtggtcactgcggctttgatcgtgacttgtgtgtttacatttacggagttcgtcagaagttgccaccggagacctcggaagcggccgcgacaaggcccgggcaaggcaacagggcgcgggtaacaggaggagtgctttcttggtggtcatacaggggcgaatcaacacggttggctttcgtgtgagtttgccttcacgagacttcgattcagcgggcacgaacggagccgcagcaacgagatttttttttagcagtgctgagaggtgggatgacacgccagtctgcgcgcaagagtgcgccagcgagtccaggtgctacgacacgaagttctgggacgccagtgacggacgccgcgctgcccgaacgtaagcgacgccgcgttgaagagcgcacccgagtcgtagttgatgatggttgtggagaagtgctgaataagaattgttgtcggagaaaggcggcagggccgatcgactggaggcatgagagatcggcgatcgagagacaggccgcaaggatctacggatcagaaggagttcttcgggagatctcaggtggtccgatgacaccggcgcgtgaggcaggacatgtggcaagccgtattgtgggtgatcgtgctcgaaccgcggcgtgattcggagccgacccaagtccagatcgacgacagaactcgcggatctgggatggccgaggacagaaggtgatggatcggcggcgcatggcaaccggcataagtcatcgatctggagttgatcgccgatcgccgatcagggccgatcggggctgatcgtggatcgaccaggatgggacgcacaggaaggacgaagtcgggacaagaatccagtaatcgtgtggttgtaggagggtaagcaaaaagatggtagcattagggagagaccagctaaacataaatcagagcagaatttgcaccgaagagcacaagtcccctcaggtcaccaagtcccaggaactaccttggcctcggcagtgtcgacactttgggtagtgaactagcggtacgattaagactggattaatacattggtcagcttgacctactctagtgatctatctcttgtgtgcaagtcctcgatcgaccggatattggtgcttggccggcgatcgttcctcctctcgatcaacctcgatcccgctataggaagcggcaagcaactcaggaaaggaaggaacacacccggaaaggtaactacaggccttggattaactccaggccgaccgatcgcagcgaacaaccctcgatcggagcgtatactcggacgcagagcgaagactaccgcgctgctccacacactatccccgcgtcacgccaagacactcgatcttcaccaagtgctgcatcatcggagccccgagagagcagatccagcccgccgacgggtacacaaggtgagaataagttcggccgatcacggatcgttggggaaccccctccgttagtcggtgtctgggcgctgatgggaagctcgatcaggccttaaccagattttggccgatcccgctacaccacatggtcaaggcggagaagaagatgttgaagttagcacttcggtgattacagcggatgagggtcataatccaggtgctactggcggtgaaagtgattccggaggtggtgatcactagcgcggtagcggcggaagtgccggtcgagtaagaagcgttgcccgttccagccaagcacgtaagaggcctagaagacatgatgatgatgaagaacagaagactgacaccacgaggcattggtgggataccttgtcacccgagcaacagcgggccatggcattgctgttgctgactccagcgccaatggcggccacaacggcaccgccaccaccatcaccttcggcagtgccaacgacgaccgtgctggattcgcgatcaaagaaaaagagactggagattgaggacttcactggcgccgccggggaaaatgtggctgcgtggctagtggcaattcccaacgctgttcaacggcagctcgcactatatggagaagtctggacggagcgagagtactacggtgtatcggcgcatttgaaaggtcctgccggtcagtggtttcatcgcttgaacgcacacatcgcaccgaactgccgtaccttagacttcctgcgatctaggctgctcgatacctatggcagtaaagtaaacgtgtgggagacgcaacttaggttggtgcagcaccgacggcaacccggagaacggctgctagactacgccaacagtcttaccgaaattggtgctgagaatccaggagtcacagccgaatgctatgtcgatgcatttattcggggcatgaacaaccgtgtattcgtgcaatccgtacggacagcaagaccgtctaccttggaagatgccgtgagttacgctgtcgagttctgtggccaatacggagaaggctgcgaggtgacaagttgacaagtggcggcacggcaataccgggcagagcgaccaggggattcggcaagtattactgcagctagcggtatgaagtcctccgccgaggtgacggcagagctcgatttggcaaggcttggactgaatctgggccaagatgatgcaacccggcccatgtttgatcgcgatggccgccaactgcgaggcttgcctgcggtcaaaggaattggtcaagaaggttcactcccattgaccgcgcttcaagccatagccgtggcgacaatggctgcaacgacgggccagaagccaacgacaaaacccgcggcgagtagaaacaagcctaaggtggctcggtcgtttgaagtcagcgtcagcaaccaagaggcccaaggcggagcagccccgttggctctgtcgccgaccgagcagatgaacagttgggcgcgcggggacaaccagcagacgcacgacaccacgccaggcgacgaatacccccagcaatatggaggcggtccatacggcggatattacggtggtcgcggtaactacgctggacgtggagacttcggtggccgtggttattacggtgggcgaggcgcatttggtggctgaggtacatttggtagtcgtggcggctacaacggacacaatgggcaaggaggtcgtgggtttcaaggaggtcgtggttttcaagcgggccgaggcaagcaactataatcaagtcgaggacaagtgggcaaacccgagcgcaaactaccaacacgatgggcgcagtattgccgaacgaaaagcagactcgacgtgtcactattgcggccagaatggccactggcaacgcgaatgcgagctaaggttggcggacttgcaagcgcggcatgtacagcgtatgatcggtggtacaacaacccctaacaacactggaaacaaccagcagccatcggcaacagcgcctgcgggaaacgcgtagaggcagtagaggcggggactctgctgccagaagaagcaaaccccaaaaccgaagcaactggagggaacaccttgcgacgacgggcgaagcgacaccgacgtcggtcgcgatggaaagacaagacgtcggtggcacaagatagcgaagtagacctgtccaccgaggatggagagatcaaggaggagaaacgagcggacgagatggtgaatacctcgcgcgttatggatgagcacgaaagggagagcaaggcagaagcggaagatgagcctcaaatggagcggagtcggtcagaaatattggaagccattgatgcgcttaatgtggaaaatgatcaacagcttccatctactgaagcgaggccggagggcagtgctgatcatccttcgagaaccatggatgaggataccaaccttcccgattatgctgaccagccttcaaggagcacttatcccagcggcccgctgaacgtcaggctacgagtaagcggaggaacatcaccagctgccagacgccggcagcgccgcgccgagagtgacatggctactgttcgagggatattgctagaggaactaagggaggaggagcgcgaccgtgcacgcgtcctgcgtgtggcggtgaagcaactggtgtcagacttgggtgaggtggccgatattgttcagaaacaccaacggcagcgcgaatttcaaaaagctgtcgtactcgtacgccgcgtcgccgctaagctggctcagaatgggcgagggctagaccactgtgtgcagacttcagggcaatctggcaaaaccgtccgggtaccggcggtggcgaaaatgccagagcaaaatgaccaagggcaccttgacaccgacgaagagtgggcaaggagagtccagcagtttgaagctcgtgtgccacaatacctggaagaaattggcagtttggaggagatgcgcgcagtgcgtcggctcgcaaaaaaggaaatgaaggagttcaaagcagcacagcggcgccgacggttgcagcaacgagcggcgtataagccccggctggacgctgcggtagctgcgggaaagagcgcgaaggacgaggaaatgaagcatccgccacgacgtgcgtatcgctatgaacgtcaaggtcactacggggatcttgaattgacgaaagatgacaatggcaacatgctgcgggtcgcccagttgcgggctgttgggagtggagtgcccagcagcttgccaacggcgctgcttgctctaagcaagaaacacactcaagaagttcggctggatacatgcgcccagtatagtgtcgctggctcaggtctgcgtcggcacgggcgttgtatttcgctaagtgcccccgtggatgccgttgaaggctttggaggtggtcaactacgcgtgctgggtgtttgggaattcagaggtacgaccaaatatcagcaaacagtaacaatccatgcgctagtagtcgatggccaggatgacgagttgctgcttggtgaagattggatggtggaacatcaagccaaaatggacttcgggaaacgtgaattgaagtacctagatgcgcaagggcggaaagtgatcgttcctttcacttgttatggagtcacgtcgttgctggacgcaacgagaaggcgcgcggccacggtgaggatggccaggacagtgaagttgccaaccaacacacgtagcacagtgcaagtgaagatagacgctgaggataacaccactggaatcttcataccaaagccctccagcaagatgcacctgctcctggctccaactctgagcattgtgaaaaatggcttggctaaagtggccgttctcaatatcgctgggcggcgggaaaagcttccggcacgagcggctttgggtacttgggttccgacagatgaaacaacggagattctcttgatgaatggagagctggagcgagagcgagtagcgtcgtgggttgctactctgcggtcggagaacacagtaccgctgacgaacgaagacagtttggacttaggtgaaatggaggatgcagacagagagctcgtgattgctcttttgaggcaatatgcttgcatcgtcgagaaaaaggaacgatgtccgcctctatctactaccggagttcagcaccacattaatacagggacagcggccccgatcatgatgggacgtcgatggcacgcggtctctgagaatgtaattattgacgaggaggtgcagtcaatgctcaacgacggcgattcccagtagtgttggtgcgcaagaaagatggcactgttcgcttttgtgtggattaccgagcgctgaatgccgtgacaatcaaggacgtgtatccgttgcccagaattgatgaaacactagaagcaatgcacggcaccgagcggtacacttcacttgatttacatgctggttattggcaactagcagtggcgccggaagataaaccgaagactgcattcacgacgcgaaaaggactctttcaattttgccgaatgccgttcgggctctgcaatgccccgagcacgtgtgtgctgagaggtctcacatgggtcagcagcctcgtatacttagacgacgtcatcgtattcactcgagggtccgtggcgcggcatgttgtcgagctggcttcggtgctggagcgcctcgcgaatactggactcagcctgaaggcaagcaagtgccgcttcgctgccacccgcatggagtacttaggccacgagttgacgccggaaggtgtacgccccgctgagcgattggagaaggcggtgaaagattttcccacaccacagaacactgcagacgtacgcagatttgtggcgctagccgggtattatcgaagattcatcaaggattttggatcctgcatggcgcctctgactaagcggctaaggcaaacgagtgcctgggattggacgcaggagcaggacgatgcatttaattgggccaaggcgtagctctcgcaaaaaccagtgctgatctatcccgactaccgcttacctttcaagctgacaacggacgcgtcgaaggttggattcggtgctgtactttcacaaaaccaagggcggggtgaccagcctgttgctttcgcctcgcgagtatgcaacgcaaccgaggcgaactacggtgcgagcgagctcgaatgcctcgcggtcgtctgggcggtgaagttgtttaggccacatctctatgaaaggaagtttactgtggtgaccgatcacgtggctttgcggtggttgatggagagcaaagagctcgcgggacgcttgcaacgattggcgttggcattacaagagtatgatttcgatatcgtgtaccggccaggaacggagaaccgcgtggccgacgccctatcaaggggcccggttccggacgagaacaccaagacgatagcttcagtcaagggcattggcggggcggcgaacggaagtccagaagaccgtgaaaatccaagtcgaagctcaaacgcagtcaacggggccaacaaggacacagctgaagcaccagaatattgtggggaactctcaccaagtgacgcgcgggagacgattgtccacgggattaaacagaagatcacctctgcagcaacggaagctctggcgtgggctttgggaatgttcgatcagtcggtttcacagagcaagcggagctcttctccaggacatggcctgcaatctagctactgtgcacaagttgcaatttcaccagacgatcagccaaacgctgatacagtaggctcccggaggcctaccttgggcgaagaagccgcgatgatccacgatgccgttaaggaaatcatgagtacggtcgctgtatatcgagtagatgcagccgagcttggtacagtgcagttcacggacgcggacatcaagcgggaacaggaaaagtcggtcatggagcagacgttaagacggcggggtgcttatcaaggacaacgtattgttgtccatggcgacggtcttgtgtatgcggcgcgggaagacggcgacaagattgtgctaccagccgtgtactggcctctggcattcaaagaagcccacgatagtatttgggcaggccacttgcgcggccctcccacgtatgaacgtcttggtcgaatgtattggtcgccgcacatgagagagagcgtgtatcaatggattgcgtgctaccaagactgcggatctcgcaaggcgtagccgaccgcagttgtaccgccgttaaggagcgtgcgcactggtgacgtgtgtgatcgatgggccattgacgtcgctggacccttcccagttacggcaaatggcaaccgctacgtcattgctaccctagagtatactacgcggtatgcagtagcaacggcggtgccccagcacactgcaaaagaaattgcaaagttcctgatggagaaggtggtgttgatgtttggaccaatgcgggaactcatgatggatggcgcagccgaattctgcagcaaggcgacggaggaactattggcattgatgcaggcaaagcaagcgactccagtcccctatcggccaaatctgctgggtctcgtggagcgttttcacaggacgtggaaagacatggtgagcttgtatatagatgatggccacgatgactgggacaatttcttgccggcagcgttgtatgcgtacaactcgtcgaagcacagcacgcatggatttcagcccaacgaattgatggcggaagctgcgaagcccgacggaattgttgcgcaaaagcagactcgcgcacccacgcgtcacgctcgtcgcgtatcatcaaatgctgatagatgacttgaagacgacgcggagtctcgccaaggaggcccttcaaaaggagcaggccagacaagcgatgtactacaaccagcgcaaagttcgccagaaggcgtcttactctgcaggacaattagtgtggatatattgcccatctcgaggtcccggcatcaccaagttcaggcaccgctagagaggacctgcacaagtgatagagcctgccgggtatgacaattacaaggtcaagctcctggaatcggatgccgagttggtcacccattgctctttcttactcccgtacttttaccctactaatttactggagaagatcgcgcgggatattgcttaagatctacgcgaagaaagtttagctgctggcgaagatgttgagaacgaggacgccgtgctgagacctgaagctgacactaatgaggaagcgacggcggaacaaggaacccaggacgagcagtcgccaataataggagctccttcacgactgagaaacgaagatgacacgcggccaacgatacaggaaggcggtggagtccagcccacagcagaacgtgccagccaaccccgaactcatcctagtaccgaccagccgactgaactacagctacccagtgttcgacgcagcaagagcaagcggcgttcagtagattgtccgaagaaaacgagcgcccggtgcggtggacgctagtgaattcatcacgacaggcgacggtcgtggaattgcagcgcggaccagagcacaattacggagagcgccctatcctgaaccggaccgagatgatgcggactggcctgggtacgatgggcccggacgggcaatggcgaacggaagtgcactcgacagcggaggaggtggaaaagcaaccagtcagggtggcgaagaaatccgtgcggatataccagtccctccactgcagcgacggcccgagatcaatgaccacgcagaagaagaacatgtatacgtcttcgctggacgcggacgtggaggtgttgacagtctggccgagcgggcgtcaggacggcgatgcatacagccccatgaattcgtcgtcgaacgacgaagacggcgatatcggtcgcgcagcggcaggtatgtcctcgaattcgaagttgaacgtgtcagtgatagatctcgtcacgagcctaccgatcgagtctggatccgcctgcgtgattacgagtgcctgtggaagcaaggtcgagtacttgatgagacggaggctacgacaatacgacccgtggactagctccagcaccggaacaggcagcagcacagacccaatatcatcgaggacgatgatgaaactggggaggagagagtaagcaaaggtgttgcgcgaccatcgcggattggagatcaggaatctacactaggccacggaaagcgttggctcgaggacggaagcgttaacagcagaagtgtacacaagacgaccagccaggacgctacaacacggcagcaggagaccagcgaagcagttggagaccaaagaagcagctggataaaacgaccaaggacgaagcgatgcgatcttgcaggtaagttgagccaagggacgaaacgtgcggcagccagcagcagacacagatgatcgcgccgcgaggcgccgcggtggccataagatcgcgctgtgaggcggcgtggagctcgtgcagagggtcgcgtgccgaagatcgcatcgagcgagtggcgccgagacgccgctgggagtggcagagcagccagttgaagatttaccaagttggtgacaagcgcgagcaagtcacctccagcagccagaagaagcctccgtcggtcgagacgttgaggcaggaggaagcgatcgtaaccaagaaatacattgattgacaagccaagtagccttacttctgttaccagcgcctgcgtcgcacgcccacgagtggttcaagtccacagctgagagtgacgggtttgagtccctgggcgggttcaagtccccggctgacggcagtgagttcaagtccctggacaggttcgagtccctggagagcaacaggtcccagccccgaggcacgacagcaggatcaagcccttgagcgggttcgagtccctgcaggccagcacaccgggttcgagtccctgccaagcaacaacgggttcaagtccctccgtgggttcgagtccctgcagagcagcgacgggttcaagtccctcagtgggttcaagtccctgacgcagagctcgggttcaagtcctgagtttggaggacgtgtggtgcgcctgggatatcgactggtgaactctgtcggacgttgtgtgttactcgtgagaggagctggaggacctcacgtgcaatcagtggtcactgcggctttgatcgtgacttgtgtgtttacatttacggagttcgtcagaagttgccaccggagacctcggaagcggccgcgacaaggcccgggcaaggcaacagggcgcgggtaacaggaggagtgctttctttggttctccttcaaagatgagcctgttgcgcaccatccattgcgttgtgctgcaaacggtagctaaaattctccaaagacgtttcaatgtgtcttcatgcttggccgtgcaagaccccgccgtgagggccaatctcctcttcagtgagtcaagggatggataatttcatgtatttggcaaatactatttgctagatgagacttctcggggatttgaaagccgaatcatatttgagacattgggagtggttaagcaatctccccaccaaacgaaaagtaatcacggcttgtcttcgccttaaggcttgatgggctgggactcacgacttgggtcttcgctggggaagtacagggttcggaccaaggatggctcaagactgagcagcccggcgtggttcgtggtcagccatggtgcccgacttcgccgagcgcgtggccaaagccgacaaactgatgcccattgctggggagttgggtgtgcccatggcgctgcttgccatcgcctggtgcgtcagcaacagcaacgtctccactgttctgctcggtgccaagactcccgctcagcttgagcagaacctgaagtgtctggaagttctgccgatgatcacccccgaggtgaaggccaagattgacgctgcactgccgtttgcccctcacgcaccggagaaggcctgggcgtctctgatgcgacagcggcacctgtagatcacccgatgaatgttgccctcactccatcaaatagcagctcaaacttgtacgtgtattagttctgaagtggaaacccctatcgaagactctgggtgacagtcgcataaacctaaagagacgggtagattatatactggatcggatacaggtcgggcctgaatttccagtcaggtttttcaatacaactacaaagacgtttcctggccacatccagcttctagttggcaagggtgggcgatatcacgggcgagggcgagcagcgcgagcgcgagactcaccaagtgctttcacgcattgccaacacccgccgatcaggcgggggcgtgtctgcgcgagcgagcgaacgcgagcgctgcaacccgataattttttttctagacacagcgcctggccgagtcgaggacttcgactaagggggtgggccagcggcaccccccgagcgaagcgagagaggggcgccccccccgtgtcgaagtccgcagacgagagccaacgcgctagtgtcctacccaaggtacggcatctctcctgaaatgcccgaccaaaacgccaggtctgacccgtgacaggctccgatacggtggggcctgccgtagcgaaagtgcgtggagttgttgtggttgcttgcttgcttttgggtaaaatgcaaagtgagattgatacctttaagttttgggctagctacgggctctaggtcttcctcttgctgtcgttctagaagctgagctaacctatactaaatgcaagtgtttttccgttttcgtaatcctatatatgcatgtttgtatacttgtgcaggtagagttctggattccgggcgccaggcagtcttgcgcaagcctggcgccagccttcaagcgacgctgcgcgcaagctacttgtggcggaggaggaggcggaggaggaggcgacgcctgacttcctagccaccaggtacgtcttccttgagcatgtctgttgctggcgtacccgcttgcgtgggtgccagcagcagacatgctgcatcatgacatccccccgggcttttaatcgcgttggcgctgttgacggaacttgtgaagaagttcacgccaatgcgatacacgtttgagcttgacctcgtactcccaaatgttttccgaatcgggaagtccgtgccacttcaccagccaaagccgtttgttgttgcgctgtttccgctggagcagagcctctgggaaatgtagttcttcgtcggtttcatcgtctaggagtactggtgcagacttgggcaaaggtcgcgacgcgaggcgttgagggttcggaacgtcatgcttgaggaacccaacattgaaactcaggtaaaggcgactcatgtggcgtggtagcttgagccgtgctacgttggagttgctcatcttctcgatttcgaacgggccgatgtacctcatcgctaacttctcacggttgagctccgtgttagccgtgatgcgcttgagtggcaagttacgcgtgtccagcaggacacggtctccttccttgaactccacgtctcagcgcttcctgtcatagtacttcttttgacgttcttgagctgccaggagattcttgcgcgccaattcaatgatcttcttgcgttcttcagcaaacttctgcgcaaaatcaactagcgggacatcttcatcacgaacttcaccaggtgtgctctgggataccaagttcctgaccttgcgtcctgtgtccacttcgaacggtgtaagcgttgtcgaggagctctccagcgtcacatgtgcgtactcgattgttctcaaatgcgtagcccagtctcgaccatgataggacaccatgcaccgtaatgcatcttccaagaccaggttctgacgctcagtctgtccatccgcttgggcgcgatatgccgtggtgagcgacaacttgacccccatgatatccatgagcgacttccaaaccttcgatgtgaacttggggtctcgatcgctgacgatcaacttcgccagaccgtgatgacgaacgactccttcaaagaagattcgtgcaacctccggggcatctgccgtcgtatgtgtcggaatatacttgggtcgcttggacagtttgtccaccactggcatgattgcatcgaagccattgcaaacaggtagccctgtcacgaattccatagtcactacttcccaacactcactcggaactggaattggcatcatagtgcctttcttgcgtgccgtacttactttccatctagcacacgtcccacagcttgccacgtattccttcgtgtccttctccaacgtgggccagaagtaccactgagcaaccctcaactgcgttcgacggattccaggatgagctgccgtatttgcatcatggaattctttcaagatgttcgtgatcagccgagcgttattggggacacacagcctcatgactgaataatccgaccacttgtacaggagcccattcgatttaacgaagtctgcagatttgttcggtcggttccatgcttctttgaaagcggggtctcgcttgtatccagcttggaacttcttcttatgatcttcgcttaaatgcacgctggatgtcgagtactcgacgttctggacttgttccacgagaacattgacttcttgctgaaccccaatagggtgactctccccccgcaagtccagatcgtcgagaagaagatagcggtcgtcggacggaagcaagcgaagcattgctgcgtggacactgtgacgtcgaagcctcgaagcctgatgcgtacaggatgacgaacaatcatgaactgctggtaacttccaaggctcgggttcgtctgtaacttcgtcgtcggaatcagtcgccgggagctgacttggacgggatagggcgtcggccacgacattgagatgatctttcacatgatgcatcgtgaagtcaaattgcgagaagaatgtaagcatgcgtcccatttcaggcgatacctgagagtgatgcaacacccaactgcaagctgcattgtcggtaaagacatcgaagtgccggccgtgaaggtagtgacgccatttctcgagagcggttttgatggccaaaagttcctgctcatgtggaggccagccaacttcatggacattgagcttctttgagtagaaggcaatcgggtggctgctgccgtcgaagtcttgcgagagcacaccgcccatgcacttacccgatgcgtcggttgtaaccgtgaaaggtttcgagaagtcaggcaaacgaagaacaggagcttgctgcaaagcgagcttcagcgatcgaaaagcgtatgcctgtgtcggaccccattctcaagtagcttgcttcttagtcagcttactcaaaggtagggcgtgtcgcgcaaagtcagagataaagcgacgatagtagccagcaagaccgagaaaactctgcagctccttcttgttcgttggatccggatattgctcgatagccctggtcttcttcgcatctacggataacccttctgctgacacggtgtggccgagaaagttaacactcgcttgaccaatcgaacacttcgatcggtgggcataaagcttctcatggcggagcacttcaaagaccacttccagatgctcgagatgctcttctttggtcttgtaaaagatgcagataacgtccaaatagaccacgacgaagtcgcacttgtcaaacaggacgcgcaccagtcgtgaccaaaccccaggcatacccgaaagacccatcggagcgacacaccactggtaagtctccttgtgagtacgaaaagcggtgtactgacgactacgcggcttgacccgcatctggtggtaaccttgggccaggtccagaaccgtaaacactgtgcagccgaccatcttgtcaaagattgcctcgattagcggtaatggaatcttcgggatcttcgtctgactgttgacatagcggaagtcgatgacccaacgaatcggaatggaactattcccggatcgcagccattctacccgcttcgggatttgaccagtcgcaggatctttcttaggaacaccgaagatattggagacccagggtgaattggagacttctatccaccctttcttcatgttttccgcgacgaacttttccaatgcttcttgctccgttttagacagtcgaaacggtgctcgggtgctagaagcggcgttaggcttcatctccatgtcgaactcgacgatgcgctcgggaggtaggccatctggcaacgtttctgggaagacatcaccaaacttgtccagcaaatgttcaatgtagtctggtacattgtctaattccactgctacacagaccttgacgaagaacagctccgcaaacttcctgtcctgcatacaacgacgaaacttcttcgtggacccaaagacaccattacgccatgcctcagccaaggcgaggtgtgaccgatgacgtgcgcgaactgcttccttttccgctttctttcgttactcttctgccgactccgactcttcaatttcgctcgggtccattgtgacggcgcctttctcacattctttctgatcttccatcttgtttgcgttcttgtccgtcttgggccgtggtctcttttccatgctcggaaatgctacttcatgcgttcgccagttgattgttggctgatatttggcaaaccacggcttacccaaggtatcgtcatgttcaatcgccagtgaactctctgttagacgcatcctctcgaacgcattgtcttccatgctgatgtccgcttccactaccttcacatcgcgatactccttgatctcacctttgaagcccttcacctgtacatcctttgttcctgtcaccttcgacaccattcctggccgtaccagatttgccgtagcaccacagtcaagcagtatcgttactgggcgcccttcgattctcccgggtttgcgaatgagctcataatccggtctagcaaccatgtcatgcatgctgacttcctcaaacgcatccacagtgtactgatcgtacacgattctttcttcaccctcgctgacgtgttgctccacagcattgacgtgctgcgagtctcgttgacgctgattcggacctatgtaggggcgctggttccgacgaggagccttgcagtgggctgcaatgtgaccaccacggaaggagttgtaacatttcctctgccgacggcactcttctgtactgagctcttgcgcactgtcgatctccattggctcaggaccatttgatcttgaagtcgactcgtttctgcggaatcgtgggtgatcacggtcgcgacgtcccgtgcgcgccggagcaccgaagtgcgagcgctcatagtccatcgctaccgtaatggaatccgtaagggtttcacaacgcttgtacagttcttcttgacgtgtatttggcatcaacccttgcgagaattacactccgtcatgtcttccacttgtagtacaatgttgcgaaaccgtgaaacgtaatcacccaacgacttgcaagatttctggctcaggtgtcgcaactgctcacgcagccgcaactgaagatccgccggaacaaacgcgcgtgccaactctcggagtaactgctccgcagagtagatctcatgcttccgcgccagataccactgaccagcctgccccttcaacgtgctcccgataatggccagtaccctcgtcgcccaacgctcgttcttccagtcaatgttgcgggcctcaaagtactgcgacaactcttcttgatacaggcggaacgactcagactcatgccccgtgtacttgggtagtctaatcccatccaacttgaagtcattcgttcctcgttgctcgttcattactctcatcatctcttgttgctgctgcatcagctgcagtactccttgcatgagctccgagacgtccgccatcttgttcgccctcctttcgcacgcggaagccttaacccgaaagtctaactagtaacaaagctgattccctctaaaacgttatacccgcgaaggtattcgttttcacacactacgataaattgccgtaaaaaagcgactaaaacgtgtttactgctcactagatgagttaatcagcacccttacagtagctggttacgctggcggcgggcttcctctcgatcacggagacggttgtcgtgctcgagttgctgacgggtggtacgagggtccaaaatcctggctacaccgaggttgatgaggccggtcaccttgccgagtttacgctggacgcgacagagctggtggatgaccgcatttttctggtctctttcctccgaagtcagtggcttaacctcagcaagatccgtttggtcgttcgcaccgcgtgccggatttgacggtagcaatcggtgcgcaacttgtcgatgccggtggcgtcgattacacccagcctctcaaaagacccgtcgggaacagcgttgtgaacgcgacgacccctacgtccagccatccaatcaaagaagcggcccgggcaactcagagtggacggcactacccctaaccgccgaactcgaaagccggactggatcgggtgcgccgctacaactggtgcctcgtacttatgccgacgttcccttgacagatgtcaggtgggtccgaattacagccaatcaccggtgcccgtagccctctccgaggttggcgaagcgcggtcaaaagcgaatcaccagccggtgcccgaagacctccctgaggttgagcgaagcgcggttgcgaggggaccaacaagtgctaccaaatgacaggctccgatgcggtggggcctgccgtagcgaaagtgcgtggagttgttgtggttgcttgcttgcttttgggtaaaatacaaagtgagattgatgcctttaagttttgggctagctacgggctctaggtcttcctcttgctgtcgttctagaagctgagctaacctatactaaatgcaagtgtttttccgttttcgtaatcctatatatgcatgtttgtatacttgtgcaggtagagttctggattccgggcgccaggcagtcttgcgcaagcctggcgccagccttcaagcgacgctgcgcgcaagctacttgtggcggaggaggaggcggaggaggaggcgacgcctgacttcctagccaccaggtacgtcttccttgagcatgtctgttgctggcgtacccgcttgcgtgggtgccagcagcagacatgctgcatcatgacaacccgtatccgaaccgacaaatagataaccaagagacgggagggccttctccaggttcgcttcaaagttcgcgtcgataaactgcacctttgtcttctcgccgaagttcgcctcgcgcaggccggtccgtgcctcttcggtcaactgctcccacatgatgagatcttgaagtgcgagtatctcctccgagaccatcaggtagagcaggcgctcgtctcatacttgcatcgcttcgtaggagagcttggcactcgtgccatccagaaaatcagaaaaagcagcggtgcacatctcgcggtgccaaaggttattctgtaagcacgtgggctccacgtttgctctcacaccatatccgctatccgttgagcttgcgtacgacccggcgagaatctttggctcctccccagcagggttgtcttgggaaaataccacgcgtacatgatggcctagagatcattgtgccaaacggctcggccgtgcacttgggagcccagacctgagcccttgcatccagagtcgagcccccccccccgtgccccttaaggcccccactcgtctcacccgccacattgacagcggggttcgggtggcagccgctgacgatgtggagacttggcttgtattaatacttgacagcagccttctctgagacggtggtcgcctcgggctgcgcgaacggctgcaccttgttatgatcgatgctgacagctcccgaggaggcaagtgcagtggctgcgatagcagctgaaagcagtgagcgcaggttcatgatccggtcgtgcctaggggagaaattcggaagtgagctggggctcgaaacataagtaccattcttgctccagtaccgtattgcgtccgatctaacggaatcagaacccgcacccaatgtggtggtggatagttgggtgagctggagaccccgtgcataaaaaatcccatagtgtaatgaggggtacggaactcggtcccccccgggggtcggatagctaccagcatcctgcgccatagacggccccagtcatggcgtacgggttccggtggcttaaatctctctaactggatcagtggtacttcctgctctgtagtcaacagatctaacgcaatcaaaccagttctccagttcttctgagcactgtcgtgaataatagcggcggagttgggccggtactattgcgcttaccgttcccttttcaacgtagtacccgctgttcatgcaattgcgtgaccgccatccagttgatgcacgtcctaagcattcgtcttgctaatttaatttaatggaatggaatccagttttccaattaaacgtaagacgagctgcctgcgcacttgacagaaaacgcgcttttagaaattggctgtcatagagtaagcctggatacatggcttgcaccgaatccttagttcatttagaagccacaaccagggctcgtaaataaaaaaaatgtactgagaatgtaagaaaagcatattagtaaggcacatttagtaaaacatgtccggccaaaagggtcgcctgtagccccagtgaattccatttcccctagatcgcacatgcattatttaatgtagtattctgcattgtatttgcccgtgtagtcctcccgagttcatacgagtagtggccagcgtatcatcactcctcgtgtcatatagatgtagatactatcttgtccagggcatccacaacttgaaggaacgtgttgctgctacagaaagtggctgtaaatgattgcgcactcggaggacggacggcacggccctcaaatctccaaagagagacgtgaggaaggaaatgcgtctcaaactctgaatagctcagatcgaggcaatgaagaaatcgaaatgctggggttcccttgatttggcgggttggatttcaccccttccctgtaaacttatcaaacctgtcaaaaggtcatcatgtgacaatacatcaaaactgcactaaaacaccaataatgacgcgaaaacccagatttaattggatacatgtattagttgttgtagcagtagcacggtcgcaacctgaatctaacacgtagactaagggtgaccgagtagctgtaggtaattagttaggagtaaccttgcttagacggtaatgtgcctgtttctaacaggctgcgaaactagggctccgcgaagggtggggataggaggcttttggtataaaacccttctttttatttttattaatacttttcttattagctacggccatctcctgcgcctgcttcgcagccgcagcatctgtccggaattttgccgtaaaactgtagatatcaactggcaatgctttagaaaattaaaattgcgagatctgtttgctaaatgcttatctctagtgctattttacagtccttacctcactttgtccatcagctcacgatatgtactgattcataccagtgtcgtcggtagcgcactggttcgatctgcccactgttggagggcccagtgcggcaccggtttcatacaagtgtgatgagtatcctaccggttcattttgccacgcatataaaccgcccagtgcggcaccggaatcgtaccggtttcaagaaaatgcgccagttagatgtccagaggtcatcgtttgactacggatttaatccgatttggtctgcgatagcagcactaacgttgcttcctatcccagtataagtacctaataaaaggggctcttgcccccctgaatctaacgcgtacatagttatcgcaaacgaccaaatcatcgatacccaccccacgactactgtacctaaacggtggctatcattactgtacactaaaccatattgtgccgtcaacagctatgcgagagagtctaaggcaatttcaatagagggtcatttttaaaaaaaaatgggcatgttttcatgttgaaggggggggggtctttcgcttcgctcgggggcgccgctacccccctttctcgaagtcctcgattcggccaggcgcggtgtctagaaaaaaaatcgggttgtagcgctcgcttgcgcagaccagccccgcctaatgggcgggcgttggaaccagtgaatgcactgagtgaggctcgccctcgcgcccgttcgccctcgcctattcctcaacagatcgtgatcaaatgcttttatgaaaatggccttccttggaaatggccctcgttagccagtctccagctacttaagacacagtccgggaaggattatctatttccactacgaaacagctagcggaaacgattgcgttagatcggacgcaatattggagcaagaatggtacttatgtttcgagccccagctcacttccgaatttctcccctaggcacgaccggatcataaacctgcgctcactgatttcagctgctatcgcagccactgcacttgcctcctcgggagctgtcagcatcgatcacgacaaggtgcagccgttcgcacagcccgaggcgaccaccgtctccgagaaggctgctgtcaagtgcaagccaaatctccgcgtcgtcagcggctgccatgtggcgggtgagacgagtgggggcctcaaggggcacgggggggctcgactctggatgcaagggctcaggtctgggctcccaagtgtacggccgagccgtttggcacaatgatctctaggccatcatgtacgtgtggaatttccccaaggagaggtatgacacggccttcagcgtgtcgggctatcgacacaaaaagggctgagcgcagtggtgtggctcgacaaccctgctgtggcggagccaaaggttctcgccgtatcgtatgcaagtgcagccgatcaattcaccgtgtgagcgaacgcagagcccaagtagtgcttgtggaataaccttctccgccaccagcgccttgagggagtatctgaatgggacgagtcccaatttgtattagcttgctatcctaacaagtgatgagcacatgctctacctttgggcttcgaaggaaactggtgaacttcaggacctcatcatgtgggagcaattgaccgaagaggcaccggccggtctgagcaaggcagacttcggcgcgaagactgaggtgccattcatcgacgcgaactttgaagcgaacctagagaaggccttctcgtccctttagctttacacgatgttaattcattcttagcccgggtttccttgtgggctgatactcttccttcatgctgagctgcagccatctcccgacatggctacagttttacgtgccatacatatgagtcggtgaagactttcgtggtgatcatggagggacgcgatccgctcagcataacggatcttgtcgacttgaagtgtgtaccatgcgaatcccaagactggcgcttctcgctctcggcttgctctgcgcagtgaacgccgctaactccaacaccaagaaggaactcgtgtccgagtacgtccacgtgccgacctcctgcgataccgagaactgcgtggcgggcggctgcctcttcgagaactgcgcctctccgctgtcgtgcaagggcggactctgctacttccggtacgtactgtatacacttgatgcgcggtcccttgctgtgcctttgtcagtgcggcgcagagccacttaatgctcaaatctgaaagtggcgcgacgtattccgtgtctcgaggcagcaagtgcaagacggccgtgtgcgaaggaggcgcctgcatctttgacgacacagcagatgcctcgtgtccaggcggtggctgcagcttcgtgaatgtaccgaatacgctggcagacggatactgcgacggcggcggctgcacgctggaaggagacagtcacccatccagcttatccgggtcgcttgcccaatgaggcttacgcggtggctactgccctttgtttttgacaaagttgcctcgacagctgctgataactccatcgtagctaaatgaaattcataacaaacctttccaaagcacgaatgcactcgaagtcgagttcttctatctcgccgcatcatttggcgtacaaaatgcttgaaaaccccttcttcaagcgttttaattctgctgggcttggttttgattttgttgcactagggaagaaccttgtgtccatggggcaattaacctgagcatatcgctctgttcgtttagtagcagacagttccaagaaaaactagatcgctggtgcttcaaggctgttcagctgtagcaaaattctacttgaaaatgcaaatgcctatctctaagtgctattgccgcccgcctcaattgttctctttacttaaattaccctgctcaatatatgtactgattcataccagtgacgtcggtagcacaccagttgtctgaaaaatcaaaagtggggttcatcttcatctttcgatcgaatggtcgattgaactatacatcaaactttggcaacgttttacggtagggaatgcattgcacgcgtatacactacgaagcaatctataagttaaggtcaacgctttttcgaagctcatgccaagtttgtgaaacgcgcgacaagacattcatgactctctgcttgtatcacggttttgataagcatattaagtacctgtgtcacacacatttctaggctacacacaggctgtgtgtagcctagaaatggcagttaagctggtagatttaaaagtctcctactatgcgggccccaaggctacgatgatggttgggaacttgttatacaaaagctcaaacacgttgaagtgtatctcgtaaggaagcgtttcgtagcatggttgaagactgtgatgaccaatactgcgcacacgctcgtaagggtgctgtagagtccttcttcatcctcaccacggccgtcaatattgccaccaatttggtggcaccaaaagatgaattccacaaaccgggattcatgttgattaagcaactgcagattttttatcgtggtgggccaatcgccaccgtatcctcgacagcgtcgtggtcgtcgagtgtccggctgactgctcaggctctaccctcttgcaccacgagctccgcgttgtccaagccgctggttaagacccgcagcatgaagtgcaactgcacgaagcgtcctgcttccgtgtagaaggctggcatctgtagcttctcgacctaacgcacgtagtgggttgggcgaaggctgtctaaggtgtgatcgaatagtacagcatatgaacctgtaactcagtcgacattttttgacatgtgaacgaaataaagctggtggagcccttcaggctactacgtagcccccccccctcgtaaagatctgcattaatttgtcaaaattaatgctggagtctttgaagcggcaggatgttactacatgtagctcatgtaggtaggtatttaattgctcttgctcagagcgcatcgctggaacttagtttgtagcagcttcagcctctgtagatatgccacgttcgctctatccatagtcctttcacataacgaatcctcgcttgtttgtatccgtattgaagaccatccgtcgtattcttagcagaagccaggacagcactacgctgcagaagatggtgcccagtgattcagtgcaggcagataagatgacgccctctctgagaagggatttctcagccaacgtgatctgccacgggcagggaggagtcctcattgaggacacatacacgtatgtacccgcaggagatcccaactcgtgcttgcggtcctggattcagcgggcgcaatcgctcactacgataaggcgagtttactcaacgatgagaaagcgtaagatttgaagcggccaggtgctcacttgttggtgatgcaatccatcgtgctccccattctggaattcaccgccatcccagtacacctccgccaagaactacctccgctgccatggcttctgcttcgaccgacaaacctgcctgcatggcctaccgcttcctgggcaactccggcctcttggtgtccaagctcgctctcggcagttgggtggaaagtacacgccggaagcttggtaccaggtgatgaagctcgccttcgagcacggcgtcaacctctttgacaacgccgagacgtacggcgacgggctggccgagaagaacataggctttgccattacgaagggcatcgctgaaggagtctggacgcgcgagagcctcgtggtcaccaccaagatccaagcgttttgacgcagtcggcccgaacgatcgtggcctcagtcgcaagcacatcgtggagggcaccaaggcctcactcaagagactggagctggactacgtcgacgtcatcttttgccaccagccccacccgtacacgcccatggaggagatcgtgcgagcgatgaacttcgtcatcgagcaaggttgggccatctactggggcacgagctcctgggctgtcgctgacatccgcgacgtcgccgaccgcctgggcttgatccgcccgattgtggggcaacccgagtacagtctgctggagcgctccaaggtcgaggttgagtacgcggacctgtacaagaagtacaagctgggtctgacgacgtggtctcctctggcattcgggattctgactggcaagtacagcgctggtgccccggaaggtctaggctggaaaatccgatgtacaagtcgttcgtgccggacttcgcaggccgactcgcgaaggccgacaagctgaagcctgttgccaaggagctcggcgtgactatggcggagcttgccctcgcttggtgtgtcagcaacgagaacgtgtccagtgtgctggtcggcgccaagacgatcgaacagctcaagcagaatctgaaaaggtgcttgaggtgctgaacaaggtcacgcccgaggtgaaggccaagatcgacgccctggcgccgttcgtgcccgagctaccgaagccggcgcgatcggcaaagctgcgggctcagtacctctagcttcttaaccacctgtagtcgactgactgctaacaattcgagctgcccaagaacaatacacgtgcttgttcatcgttcattgacctcattgcctgtgtcgctagtagtggatcagcgggtgcacgggccacacgcgctccgattcgagctcgactgcaacagggctgtcgaaaacgtctagatactcgtccagggtcatgagctcgtctcgactcagcagccatagcacgaggtcgttagacggcagaaacgtctggtccgtattcgacagattcgtcaggcacttgcggatctcggccggcggcatggggccgatcttcttgaggaacttgatgaggctgaggaaggtctcgaccacgcactgcggcgctgagtcgtccgtccactcgccggcatcgctgcgattgagcgtgatcttcttaaagtagagcccctggaggatccgcacgccgtggtcgtcgcagctggccagcaccttcatggagctggcctcgatgatgcgttgatgctgcagctgcttgaggaggatcaagaagtgctcggccgtcgtctccaggaagatgacgaccgtcgcgtcgtgcagcagcacgagccccgtggcctcgcactggatccggctcagcagcttggcgaagtactcctgcgtcttgcacgcgttgtccgcggacgggtcggccagcttgccgagcacggccgatctcgatagccgcaggtcaaacttggccgacgcgtcggtcgtagcggccagcgagctgctgctgctgccgtggtgcgactggttgtcctcggccgtggactcgccgccgttggtggcgtcctgctgcgcctcctgcaggcggcgaggctgcggcgggttcacgaacgtcagcacctccgagagcgacggacccagcagctccagcgcgtcgaacgacggctccgacactgcggcggctacgaccttctctggggtgtctggcccgggcgagctcggccggtcggcaccgtccctgggcatcaccgacagccgcatccttgacccgctggtgcccagcgaccgcgtcgacggcgagtgccccggaagcgcattgcgcgtagatccctgccgagcagctctcgcagccttctccatgacggctggacggtctcaatctggccgcgtcggttcacagaagtctctcgatatctttgtatcggggccatccggccggaatcgtgacaggagcatggagcgcagtagtagtaggatgtaagaagttataaagacgcaagcttcgttgaaacacgctggccgcagccatagtagcgccgcgcttcaactcgttaaacacaagtcacatattacgtcaacgttgtttcgaccaatcagaggacgtgctggaccactcctcggatcccagctccgatgtcacaacggaaagaggcgccttcaagctcaagcccaagctcccgactaccgcagcggagcatcaatggcggcgctgtccaagtcgcaggcggcgtcgggcgcggcctccatcgcgtcgctcgtggcgctggccgtggccatccgcgcgcacggccagcagaaggccaacgcggccgggcgcctggactcggagttcatgaccaagaagcacggcggccgccacaaggtggcggtgaaccgcgagttcgcgcgccgcttcctgcggctgttcaaggtgatcgttcccgggccgtgcacggccgaggtgggcttcgccgcgctcgtggccgccatgctcgtggcccgcacgtccttcgacatcgtggtgctgcacacgttcacggccatcgagcgcgccatcatctcgcgctcgcaggcggacttcgcgcgccacctgcggcgcttcgtggccatcatgctgcccatgtcgtgcgtcaactcgctgctcaagtacggccacacggagctgagcctgcgcttccgcacgcggctcaccaagcacctctacgcgcagtacgtcaagggcttcgtctactacaaggtgtccaacctggacaaccgcatctcgaacgccgaccagctgctcacggtggacgtggagcgcttcagcaactcggtggccgacctctactccaacatgtccaagcccctgctggacatcgccatctacgccgtcaagctgtccagcacgattggggtcgagggccccgtgatcatgctcagctaccttgtggcctcgggcttcttcctcacgtggctccgacagcccacgagccgcttcaccatcgccgagcagcagatggagggcaacttccgcttcatgaactcgaggctcatcacgcacagcgaggagatcgccttctacaacggcaacgtgcgcgagaagcgcatcctggaccagtccttcagccgcctcatcgacctcgtgcgcagctcgcagcagttccgcttctccatgagcgtcatcgacaacatcgtggccaagtacttggctacggtcgtgggctacgccgtgctgtccaagcccttcctggacatgaacaacaagcggctcgagcacaccacgtacgctgaacgcatggaggactacttccgctcgggcaagatgctgctcaagatgtcggaggccatgggccgcctcgtgctgtccggccgcgagctcacgcgtctcgcaggcttcacggcccgcgtgacggagatgatcgacgtgctgaccgacctggaccagggcaagtaccagcgcacgatgctcaaggccgaggacgacgacctgtcggacgaacccgaggcgcagtccacgtcggcggagtcgctgggcctgtacccgaacaagggcgagctccagtaccgcgaccacgtgatccacttcgaggatgtcccgctcgtgacccccaatggcgacgtgctggtgccgtcgctcaacatcaaggtcaagtcgggcatgaacgtcgttgtggcaggccccaacggatgcggcaagagctcgctgttccgaatcctgggcgagctctggcccatgttcggcggcaagctgaccaagccggagcgcaacggcctgttctacattccgcagcgaccgtacctgacgctgggctcgcttcgtgaccagattatctaccctcactcgctcaaggagatgcgggcgtcgggccggacggatgaagacttgatgcacttcctggagaaggttcagctcggctacctcgtggaccgcgaaggcgggtgggacgtcattcacgactgggccgatgtgctgtcgggcggtgagaagcagcgcgtggccatggcccggttgttctaccacaagccgcagttcgccatcctggacgagtgcacgtctgctgtcagcgtcgacgtggagggcgccatgtacagctactgccgcgagcagaacatcacgctcttcaccgtgtcgcaccgcaagtcgctgtggacgtaccacgaatacgtgcttcgggtgcgtgctgtgtgccaatatcttgtgtatggtgtccctgctaacgtgttgttacttggtgatgtggttctagttcgacggccgtggccactacgagttcaagaaaatagacgaggccgacgaagctttcggctcttaaagcgcaacagtcaactgaactatacggctgcagatcgcccagcctgtgtatttgtccccactttcccggttaaaacccgcaaacatgctaatgcaacttccgctcgtgtgtgttgcagtgttgtcggtgtctatttggtggttatggattcaaaagcgcgagcttccagtcgcaaattctatctcttatctatctagctaatgacatgctcttgtcgtatcccagcagaaacaatgcgcgggccagttcgtgttcacggagtctctgtctttcctctccaagctcctcacgccaggtctccatctcggccagcgtggcgtccatcccagccgcgtcttgcgacttgaacagccgcgcgaagaagactttggcctgcttcctcactgcatcgtcacgcacggtgtccagcaagtcgcagagccagctccagttggcgtcgttgagcactgtatccgctacacccaagtactcctgctccccctgctggtcgtcgttggacccgcacgagctcggaggcgacggaattcgcacggattctaggttgctgatggcggagtttagtgcttcggcagtgagggacggcgccatgcttctggtacttgctgggggggggggggctgctgcagtgagctctgcaggcaggaagcaagttggggagtgccgttggctgggctaagcttagcttgcaggcgaaggtccgtccgttactcgttgtgcctcttcgcactggctctgacgcgattatcaggaggagtaacgcttatgtaagtgaagtagcactagttccggatacttgaagtttgtgtagccatcctctcaccctgatcctgaatggagcctgaagatgatactgttgccgtagtgttccagcgtgaggaacttggactggagcagaactcgctgcgaccacagcacgaaggcgagttggtggatgcccgacactccgagccgtcgcgagacgaggcccaggaaggtcaattccatgctgccgagcaggaccaagtaccgtatcatactccccacggcggtggacgtgttcatggtgtttatagtggcgaagtatttgcggttgggcagcctggagacgataagaagatagatccctatgccagcaatatacacattccgtcaccagcatcaaaaccaaacgtcctgagcgaacctcaacgtacgaaccgtagaggataatcctgtagatgataatgcacgatcgcaataaaatgacttcgctctgatgcaagcttgacactacattgtggagaaaggtttccctctgctgggcccaagctgcgcctagcggtatacactcatcctcgtgctcacaagctgtagagctgggcaatacgctctgccttagcactaagcggactctcaggaaacggaagcacttgcgtttaagccgtaggctttgaaagagattgcgctcggatcctgcggtctatatgttgcgatttggggcacgagtcgcactcttggggtgacgtgttatcaaacggagcagtgctgcttgaggtggaaaatgtccgaggcggcaaactccgatggagaatcccgagtagcgggtcttgctgggctaaattcagcaccgcagatacattgtcgtccgataccacagtcttgaacgctcgaagctcggacttggccctgtgcatccttgagaatgtctcggtagttgagcagcatttgacacacgttcacgacaattcccgctgccagtgtttcgagcgacttggcgatctgaaggcacatggccgtgaagagcacgtggtaaaggtgtccgacacgccagtgaagacaggatacaccactaccgggatcatgttcgttctgatccacaggttaagcggtttagtaagaacccaaaggcgcccatcgagccgacagggacgatctgagtgaatggcactggaaaaacaggcgccccacaagcgatggcggcaatgtttgcaatccccatcctgacgtaaccttgctgtgtccgaggacaaacttccacgatattgtccggatttctggaataaacgtgagttgcacgaacactggcatggcggtcgtaatcacgtacgttcgtagctggaagtggagagaatctcggtatcctttggcggggtcagccagcggaatactctcgatggtcaggttgacgaggaaacacgggatcggagtcagaagcaggatggacaggacccacgacggtgttgcttcggcccgaaagcgatcgaacgcgtccaactaagcaatggtgtccaccccaggaagtataccaacaacaccttgaagtctccgtccgacaccttttaagacgctaacctttatccaggcagggcgcagagcgaggtgaccgtcgggcggcaagggcgatacagccgtcattggtaattctctaattaagagagctcagcatcggtgaatgtgaaggcatcgtgcttaggaactggcaaagctatttggaggtgcctttactaagtcgcgaataactagatagcgtgagaaaacaatggatggaaactactttctagcaaaattccgtcaccacgcaataattttgaaccgcaaagcatggtcaatcgtataaaggcaccgaggcagcagatgcgtatttcatgtttttcttttattgaaatctgaaattaatctttcgaataccaaaagagcgtttttgtttacaggacgagctagcaggacacccgaaagcatgaggtaatatcactttattgagcgatattggagtaaactccctgaacctgagtccttgagaagactttaattaaccattatgaagattgtaaatggccccgttcccgtagtgagcgagtgggaagccgaggatcatgagtgacagcgtcaggaacttggcctggaccagaatccactgggagcggaggacgaacgcgagctggaacagtcccgagactcccagtcgacgccggatcagaacgagataaacgcctgcgtagacggtctcaagtacgcacagagacagaagctgccttaaagtcgtacctatttcagcgatggctgtcaatgacacgagcgtggcgaagtacgcgcgattgggcatcgcaaacgtgaacaacaggtagaatactacgcaacgtccaaaacaacgattagaaccaaatgtttgggagaatattaagtactcacggcctacttaccgtagaacgacgtcgtgacaattgtgatatacgaccgcagcaggatgatctccgtctgatgaagagccgaggtcacgtggttgatgtaaagttcccgcaaatccggcgaagttttggcttccgcgacaactttcatcgaggaagcctgcagtttgaacgcctgcagttctaacagagtttgttggcgcaggacggacgtagctctacctctacctttaacatttccgggaataatcttaacgaatccatttggccctttcgttgatgctcgaggttgtacgatacagttcgataaagccacacgcgactcgaaggcttggaacacgccgctgtagcttgcaatagaggcctcatcgctgtacctggggtaggtagatagcagtcccgagggggagttcgagtgcaaactcatagcgacagagtcaatccgggaaaactttaacgtggctgcgattacgtcgtcggtcataaagtcgaacccttcgcgacggagctgctgtttcgtatcgttgagagctgcagaggtggccagaatgtagcgccagttgaagagcttttgcagcatgttgaacgctccaatgaacatcagagtctctgtggactttgcattttggaggatgacgctggtgaagaggatgtggtgaaagtggccggcacagcaggtgatgacccccacgaggtcttggtcgtctcttgagaccagccagagccatcgacgcagcgccagtttaatcaccgggaggagcatggagagcgccaattgctggttgggcgggagtgacatgaagacggcagtgaatacaggataaacgacaatggggaggaactccatgccttggcggttgtctactttggtgcatttcgctcggaaagcgccgtgttctggcccccatctctgacggtggtagcagatcatcgaccctacgatcgccatgggaatcacaggtgtgaatagcgagaaagggacaggataaagacttgaagatgccgagatcacgatgttcgtgcttatgctgacgatgccttggattaagccaaaacccatcaacgacgccgaggatccagggagaaactccggtacgcagtccttctttaccagtccagagatcgaattctggatgctggtagtgaggaactggcgcacttgaaaggcgaacgagcgtcgaagcccctcctttgggtctgcgagtggaatcgcttcgatcaccaggttcgtcattaaacacgggattggtgacaggataaggattgaagccactttccaacgagaagtttggagctggaagcgctgcaatgcgtccaacttcccgattgtgtagtggccagggagacgaccgacgaaagcttgtctccaacgccagatcttccgaagagagcgacagaagcgagagcagggatacgataccgatacgggaggctttgcacttgttgggaccactgcaaccataatgttaggcggtcccagtgacgaaagcgcaactgacgatctgcgcgctctttagcgacagaaatgttgacaagggatcaggaattaaggacgactgcaacgaagttctatttggagaattggactgagaccttatcctgtatgccatcaaagaattaggaattcaagttcgtgtcgtagcattcaacgacaatttggttaagaataatgaagcagattttaatattttttaagtggcaggcttactgaggccgtaaatgagcgtgtttccatagtgagcgaggggaaatccgaaaatcatgaccgagaacatgacaaaccttgcctggacaaggacccactgcgatcgtagtacgaacgcaagttgatacaaaccgtggactccttgtaatgccggattaaaaccaaatagacacacaagaagccaatctcgagaacgcagacgaacaccaggcgcatcaacggtcgctcgatctcactgaaagtcgaaacagacgccagagtgatgaagtacgagtgaataggcagggcgaaaatgtacatgaagtagattactgtggacggaggtagacgcagccattagtaaaatattagttataaaaaacaatttccatgtaattctgaagcttacttaccgtgtacttaagtaaagtggtcgcaaaaatggtaatgtacgagcgcagcaagatactttcagtctggtgcagagccaccgtgaggcttcgaacgtactcttcccgagacgcagtcgaccgtggcttgaccatggaatttctggacgaaatcaagtggttgcgagatggcagcgccttcagcgagcgaggtctcgacatgacgtgaacgacttgccctggatgaggattcgctgggaccagagcacgaacgcgagttgctgcagccctgaggagcccaatcggtgggagatgaggatcatgcacatggccaagaccaaaagctccagagtgcacagcaccagcatgtggaagatcatgctggccactgcgtcgaacgtggcggtggtcgccatagtgacgaagaatcggcggttgggcagcgagaagatgagtgcctggtacagtcctgcagtagaatcagacacgtcaggtagtgtagccaaccaaccgcacaacagagcaaacctcgcactaaccgtagaacggcaacacgaagatggtgatgtaggaccgaagcaggacgatttcagtctgatgcaacgccgacgtgacttgccgaacgtatagctcctgctgacgcgtgaggtcgctctgggactcgtacacttgtcggctgtgtatccgcgagatttcactgtgtttcgcaaaggaagctgtcaaatgctccgtcataaatgattcgtcggatggcttccggctcgaccgcttcgaagggacaatattcgtgaacgctcgggtgataaaggctacggatccagaaactcttgaatttgtcgggacattcggcacgctgctgtgtcggaggcttctggaggagaagcgtcgacccccactttgtaaaagtttctggtgtttcgagacgtaatcttcgtgctggtagcctggaaataaggagaagaaccgtgatagtcgcttgcgatgcagcagcttggacacgttctcctgctgcgcgatggttaatgcagacgtgaccgcctcatgaccaggcaattccgggagtgcttcaaaggttctgcggatttcgtccgcattttggaggatgcctcgacagttgagcagcatctggagcgtgttgaccgcgatgacgatggcgtacgccttcaaggactttgcgctctgcagacacatgaccgtgaataaaatatggtacaggtggccgacgctgcacgtggcggcgcccaccaggtctgtggcggagttagtgtggtgtagtgcccagggaggaagcgggcacgtcggtgtcggtgaacaaaggcgccgaaacgaatgctgatggatgcggatgatgaactcgacgcagttgatgaaacgcgacgcgattgatgggggcgacgcgcggcagaggtcgacggaaagtcgacgcgggtgatgcgccgcgagacacagcgacagagtccaactcgacgcgtaaccatccgacgagtcgactagcgccccgtctctgcaaaacgcgtcgaccctaatccccgccgaccaaaacccgccgagcaagacgcgccaagcaaaacgcgccgaccaaaacgcgtcgaggtaagatcttgattacgccacgcaaatcaggttgaatgacggcagtgcaagcacgacagaagtagggataggcacaggacgataggcttagcaagcagtagtacggagtagccagtagctagggcataggatagggtaaggactcagtcccgaaatttctctgaaccacaaagacctcccgtcttctccgaggttccaggggaaccaccaagcgccggcaagtagagccgcctcgatatcgcggccccccgtcgtttgctggttcgggtgctcaccccccacagacccatgctggatcaaaggcacgttaaacgtataccgtttaggtgggcgcccgataacgcgctgcctaggcgaaggaccgcactggcctgataaccaccgtgcacaagacccccctgtaggccctataacgccacacaagccccaggaaacgccggtccgataacgccgcacgcccgacggaaacgctgaggaaacgccggcccgataacgccgcacgccaaaggctcgacgccccacgacaaggaacaagcgttaacacaagaacccccaactccgaagccggcgaagacttgggcctgtatgtcgaagatacgccactccaacaaccgggaataatttgctcggcgcgaccgctatccagacgggccgagtttgtgcgagatcgcattcgcgagatttctgcgagggcgctactcctcattagtccgtttcgcaacggcaagatccatagcgaagggtctcctgccgccagcaggcaggagacctcacttcgagaaaatgccgctaagcaacaaacaagttaaaatctgctgtcatcgacccggcttgtcgctccgtcgaagtccggcaagccgtccaactcccgcttcctcaagctgcatcgtgccaccgcactatttggggctttctctactaggttgcgcattcaggggagagggccaccatatttgcaacattgtagccttccacgaaggttattatgatggaagcaggcgacgttgaagactacaacagcgtgggtgaggaagaagagctccgagccgatgagatcgcgcaagtgcgagctgttttgggtagtctgggaagtctggagaagacaatcaacgatctatagcgagaccaaggtctcatgctcgactccgtcacgaagttggcaaatcgcaccgagcaccggcaacaggacaactacaaggagatcagggcaaaccaggagctgctgcagcaagtgatcgagcagcttcaagaatatgcgcaccaaaatgaaacccgacaaagtacacaggaagctgttatcacgcatctccagtcggaggtggctaccttgcggcaacaagtgcacctgctatcggccaacacgaccagcacggggcagcaagcagcaagtcctgcagtcacgatgccagccgcaagttctgcaactcctgtagtcacgggcatggacgagaattcaggtgcggagtgggacgtctttgggcgtatgcctcccaacacgccggtctacgatagaaaagagctggagacacgactagcgacttgcatccgactacatgaagctccaatttacagcggtgaaacaagtgaggatattgaagtctatgtcctcaatatgatcaagtggtacgcagcgttcggcctatattttcaacaggagcaggtcgattatcgcgtcggagaacttatgatgaaccacacccaagggaaagcaaaggactggtttctccgggaatatcacggcgaacagcgctggagccacatcatccgcaagatgaagcaacggttcgtgacacgctcccaccaagaagatttggtggctcaattatttagctgcgcgcaaggcaatcgttcgttggacacgtacaacgatgaatttcgccggctagcacgcacggcaggcgtccctgagtacatcaagatacttcgatacaaacagggactatcgtctgtgcaactgctgcatcttctcaagacgaagtcgttcgacacgctagacgagctaattgaagccccgcgcacgctgaacccacgcgaagccgctcgatcgaatgataaaagcagcaaaagcagcaagtccttccctccaaagcaggataagaacatggacgcagcaaagtgcacgtcgtcgtggtgcacggagaaggggcatactaaagagcgctgctggatgctacaccccgagctgaagccgaaatggctcaaagacaacaacaagaacaagggcaaaggtgctgcggctgtatccaaaacaagcgctgcatgcgaggaaaagaagctgtggtctgttctcagcatgatccagagcgacattgcgaagctcaagggggatttaaactagctggccttagggatggcgtcctaaggccaaacacagccactattagccgcgagaattgggtcttcgaccctggtacggaggctaattcgttctacttccagcggcgtaccgaggagaagccgctaccagcaacgtatttgataaaaaacgttagctgcgttcgtgaagacgagattcagattgcgaagacattctttgacgaaggtgctgacttttgtggagtttcaatgtagtacagtcaaacctgtttatatgaggccctgttggtgaccatctactacaatcactcatataaaatggactcagttaaaacaattatgtggtgcacgtaaagaaatcgtgcatagtttgctgccgcttgccttcaccgtagtctctcgaaccaaagcggtcacggtctgtaaagatcttcgttctctatcagtctgctctccgcattgcagcagaaatgcagccagctccatgcagtgtctcagagcaatggcaggttgaactgcgggttcctgttcctcctcttcctcctgctcgtcctgcgaaactgcatcacttcctgccgcttcgtccactagcacatctggctcgtgcacaggaacgtcttcgtccactgccagatactcactagcgctaacagcgccctcccacctcgatagcatctccgttaactcctccatctcgttgccggatacctcctcaatgtaatccgtgtcagcacgggtccttcctagcatctttcctcccaaaatgcgagtcttgacccagcaatttgtaattgtcgttggcgtcacacccgcccaagcatcaatggagaattggacagcttccagtacgttgagcttgcgtgtaatgttagcttcaagtgcatccaaacaccaccgcacaaaatactttcggtaccgagccttgaacgaccggataatacctgaataaaaaaacaccgtaatagagttggttagtttaggctacaccacaatatagataaaatatttacctgcatccagcggctgtacggcggatgtcatgttaggagggaggaagtgagcagtcacatgagtcaggtttcgtagaatcttgtggcatgaagcattgtcgactagaagtaggaccttgcgattggcggccgccattctcatgttgaagaggtgcagccattcgtcaaaaatgacggatgtcatccaggcgttcttggaggacttgtacaatatacgtttacctttaatcgccgctccctttttaaagcacctcgggttcttggccgtaccgatgattattgggtcgagcttgtcggagccagtcgcgttgcagcagaaggccaaagtcaaacgttgcttttcctttttcttgcccttgcgaatagtcgtagctagcgttcgattaggcgctaagcgatagaaaagcgccgtttcgtcgaagttgaacacattttcgggtgtaaactgcgccaccaactcttgtagctctagcctcgcatctcgcacttcatcagcttctacagcgccaccttcgccgtgtagcgtatgggagcggatctcattgcgcttcttaaagctttgaagccagccgttgcttagccggagctgcgtggcattgatgcctaagcgctccgccagctcatgcgctttcagcaggagcacgtcgtccgccatcgccgttttagcttcgttctgaaagaaaaattccctcagttcccgctcgaactgagggaattttactcggcgccgcttggtcgcactcagatcgacgtggctgaagtaggaagaaggcaggttgcgcagtcgggtgagtgtggcacggctgacccgggccttgaaagttgcgtagatccactcggcgagcatggggttgttcatgccaggattctgcttgagctttaggtgcacttggagcttttgttctagcgtcagacaggtgcgaggagacatggcgagcgaagaaggcttgcggtaggcgttgagtgttgagcagtggtgctttgaagagtgtgtggccgtgagcagtgtgaatcaaataaacaggtgagacctaatttggtcctcaaaaatgtgattcatataccttgtatgcatataaacagagatcatacaaaaactaagtgaaatatttggtagcgacaaagcctgcatcaaataaacggcatggctccaatagagaggatcatataaacaggtttgactgtatgcggagaaaatggactggggtcagtacgaaaaaaatggggtcgatggagctgacctacgcaaacggcaagacggaatcgattagaaatcaaacgatcaagctgacagtcttggtcgacaatatcccaggttatacagcggacttccagctctgtcacattcctaaccagtgcgaattgatgctgggcgtaccctggaagcgcgcgcggaatcctgttatcgactgggagacagatcgcgtgtatacaaaggaggagttcgtcaaagaagtcctcaagcagtcatcaccgaagagcgagcacgtgggtagaagctatcactactgcagacgattcgggatgacgaaggtaattaatttcaagaaagctgacaagctcgtgcggcagaaagacgtggagttcatcgcactcatcccacccgagacaattaacgcactctaccaggaagtcctaaatgagcaagctgggagtagcggggcagctcacggagtcagcaagaaacaaaccgacaaagctcagcggcagcagacgacggatatggacagcttcaaagataatccaggctatggacttctaaaagagtttgttccaaccattttccgtgatgaacttcctgtcggcccgcctcagcatggtgagcacgagatggaggtaatcgacccgcaacgagcgatttatactgcgcaatggcggctgagtcctgatcaagaacgtgggctgcgcgagtggacgaaagtaatgctgagagcagagctgattcgaccgagcaagtctcctcacgcggccccaacgttttgcatcaagaaaccggttgggtggcgcatagttcatgattacagggctatgaacgcgagaacagtccgacaatcgacatcgatgccgcgcaaggacgtcattctcgaccgcatgagtggggcgtactggtacagttgtttcgatttgctctcggggtattatcaaattcggatgcgtccgaaggatattccgttcacagcatttcaaacgcctgacggcctgttcgagtatctcgcagtgcccatgggactcagtaatgcgcctgcaacctttaaccgcattgtccaagggatctttgaggacatgcgagacttcgtggccacgtattttgacgatttgtacgtgtttaccaaggagccagacctggcgtcacatctcgctgcagttcgaaaggtgttcgagcgctgtcgagacaagaaactctacctcaaactcgcgaagtcgacgctgtgctccgacgaaataccgtgcctcggcgattttgtcggtcgacgtggagttaggattgaccccgacaaagttcgcgtgattcggagctggccacgcccaaagacagccaaagaattgcagtctttcctgggcacgaccgtgtatgtccagagattctgcaaggactactcggaaattaatgttccattgtttaacatgatcaaaagcaaggagaaaagacaccttgtatggtcggcggagagcgtgcgtccgggcatttgaacagctcaaggttgctctcagcgaaacaccagtgctcgcgttgccagattttagcaagtctttctacttgaggacggatgcgtcgcggttcgcagtgggcggagttctatatcaaatgcagagaagggctcctgaagagaaggaggtcgagcagccgatcgcgttctgcggaagaaaaatgaaggctgcagaactcaattatcccactcacgaacaggaaatgctggccattatccactgcctaaacatttggagagtgtatctcgtggatggaggctgcaccgtcgaaacggatcaccactcgcttgagcgggtgctgacccagaaaaagattaatcgacggatatgccgctggtacgatctgctagccgagttcaacttacgttttaagtatatccctggatcgaccaatatcgtagcggacgcactcagtcgtcgtccggatttcgaggtcgactttgagcagcagaagcagaagcagatgcatgctgtatcacgtctcaagcccctcacgctcttaacgttgattcggcggtcgcaacgccgagcggggtggacagacgcagctctcaacgaaataagctcggagaagttgaggtacgaccaggaacaaatgctggtatatcactacaaacctgacggatctcggcgaattgcgattccagctgatgacattgaaatgcgcaatactattctctgggagtaccacgatgttgctacggcgggacatcctggggtagagaaaacgatcgcagagatccacgctagatattactggaagcggatgcacaagactgtacgtgcgtacattgcaacctgtgagtcgtgccagcgcaacaagcggcgccccggaaaatctcctgggctcttgcatcctctagaaattccaacgcggagatgggcatcaatcggcatggactttattacggggcttccagctacaataacacagcaagacactattctcgttgtcgtcgatcgactcacgaaaagagcgcattttatcccgacaacatcaacaattacgactgaagagctagctgcgttgtttgtggagcagtacgtgcgattacatgggcttcctgtggatatcgtatctgacagggatccaaaatttacgtctaagttctggagtgcatgtgccaagatcctgagaaaaaagctgaagatggcgtcagctcaccatcagcggacggatggacaagttgaacgactcaatgctgtgctagctacttacctgcgtcactatgtgagcggcttccagaacgactgggacaagcacctagctctgggagagttcgcttacaacagtcaatatcatgctacaatccagatgagtccattccgtgctgacttgggctatgaacctcgcctacctgctgatttgcacctgccagacaagcttccagcgacagcgaccaaatttgtggcagcccagcaagagattctgcgagatttacaagctaaagcgcggcgaggggcagaaaaaatgaaattgctgtacgacagaggtcgacgggagcagaagtttgaagtcggtgaaatggtgctgatctcaactcaaaatctgactcctgcgaatattggggcagtccgaagaaaatgtgcggctcggtggattggaccatacgaggtcatcgaagttcaccatgacggatcggcgtacaagctcaatttgcccaacgaattgagcttgcaccccgtgtttcacaccatggtcctgaaaaaattcctgaaggacaaatccggtgtcagtcgcgacacgacccttccacctgtacgacttaaggatggttccgaaggccatttgatcgaggccatcatgggccatcgcatctcgaagaaaggtgtcgaagagtatcagtgcaagtgggtagtccgagacgatgacatcacgtgggagccgacagaaaatctgctctcggtgccaggattgatcagagaattccatcgaagagccaacaatctgccaagccgagcatcagcaagactcaagaacaagaaacaacaacaagtacaacatcaagtgacatgcattcagagttacttcaattcagcagaacgtcctctctgagggaggtcgtgtggcggagttagtccgtttcgcaacggcaagatccatggcgaagggtctcctgccgccagcgggaaggagacctcacttcgagaaaataccgctaagcaacaaacaagttaaaatctgctgtcatcgacccggcttgtcgctccgtcgaagtccggcaagccgtccaactcccgcttcctcaagctgcatcgtgccaccgcactatttggggctttctctactaggtcgctcattcaggggagagggccaccatatttgcaacaaggtccatctcctctctcaccaccagccacagcaggtaccgcaggaagagcttcaatactgggagaagcagtgacaaccgcagttgctgagtcgactgaacggccatgaagacggccgtgaagatcgggtagatgaggatcggcgccaggtccatcgccagccaccggtccagtcgctggagacgcacgcggttctcgggtgtctgcaagaaccgatagttgatcaagcggctgatggctgccatgggtccggttggagcgaactgcgtgaaggggacagggaaaatgtctgcaatgaccgcgatagctgcgttggtcgccagggccacgcctgcgagagccaagctcgtacccgaaatgaatcgccacgatcgagctgtgagatgggacaagcacgagactttggtcgtgatcaaggtcagcgtgacagtcgtcgcatcaggaagttgcggatctggaagtgcagcgagccgaagaagcccgtggcggggtctgcgagcgggatgctctcgatcaccacgttggccactaagcagccggtcggcgtcaagagcagaattgcagccacgtgccagcacgacgtttgctgtcggaagcggtggaacgcgtccaacttggccacggtgtactctccaggcaggcggccggcgaacactcggagccattgagccacaggcttgaagactcggaacacggggtggattggtcgtagagagggctgaatatctgagggcgctggtgagacagcaaccatgacagtgtgacttgaggtgaggtcaattgatggtgctgcagggtgtagacacaaaataaaaagctaggtttaactaaggcatgagaacccaaagacgttctaaacattagtgtgtaggatcaatttcttgtattatactgatcctaagcgatagatgaggccgttcccgtagtgagcgagtgggaatccgaggatcacgagactgaggatcacgaactttgcctggacgaggacgcgctgcgagtgtagcacgaacgcgagttggtgcagagcagaaatccccagtcgacgttggatcaacgccacgtagaagctaagaaacacgatctcaatgccgcacagcaacagtagacgttgcgaggtcttgccaatgtcagcgatactcgaaatggagacgagcgcggcgaagtacggatggtttgggagctcgaggatgtacaggagatagataactatatcgagaatatacaactttgtcaatgaaatcccacgaaaaactacaagaattcgtgaaactcaccatagaacgaggtcgcgaatattgtgatgtaggagcgaaggaggatcatttcggtctggtggagcgtggaagccacgcgctggacgtacacttctcgagcgatagttgactgcggttcactcgaggggacattcgtagactccaatgtgtcgatgaattgcaccaaaagctggttttgggggctagaagcatccaacgaaattgtatgccgttgacttgatgtattgttgtcactcgctgggagaacctgcaccagtccgctgccctgtatggaccacgaaccagatagtgtctttgaatcagatcggctgcggcctccgtcctgctgaattcgcttgagagacgtgatactcagcctcttgacgtgggccagcgacggcaagctgagggacgagctgccgcggacgcgtttactgtgtctgtgtacgaacgccttgccgtggtatcctggatacgtcgacagcaatgcggacggctggtgcgcgtgcagtttagcggccacgtcgctctcattagcaaagcgcatagcgttgtacgcggtattctccgtgagactatcaagatattcccctgtaagttgctgcttgacgtgctcgatggctgccgcgcccttcataatatagtaacatttggccgacgttgaagagtgccaccaccgctaaggtttgtatcgacttggcgttctggaggatgacgtccgtgaagaggatgtggtacaggtgaccggcacagcaagtgatgacgtgcacgaggtctccgtcgctcctcgagaccagccagaaccagcgtctcaaggccagattaatcaccggaagcagtagcgataaccagagctgttcttccgggggcagactcataaacaaggccgtgaaaatcgggtacacaaagattggcagcatttccatcccgagtcgatagtccacttggctgcttttcgctcgaaattcgggcaattcgggacccccatggggatggaaggcgtgaagtgcgcgaatggaacggggtgaacccccgtagagagcgaaatgatggcgttcgtactgatagcgataagtccttggatcaccccaaaggcggccaccaacttccacgaacccgtggagaagtctgggacgcaatctttcttgaccaacgcggggaacatggtctggatgacgctcgccaagaagtggcggatctggaacgcgatcgagtgtcggaagcccgtggctgggtcagctaatgggatggattcgagcagcaaattggccaaaagacacggcgccggtgtgaggatcaggataacaatcaccttccagcgcggagtttcgagccgaaatcgctcgaacacgtccagtttactcgccgtgtattggccgggaagacgcgtccagaggaagcacaaacatcgagctgctgagccgagccgcgtaccaagctgatttagtggagattcatcgaggggtttagagtcgggggaagttgtcgcgacgacaaccatggcgagatgccaaccatacgcacagagtggactggccaattcgtagtagcccctcgatttagagcgagctatcctcaaatgcgactaagttgacaagggttttcgttgttcaagacacggacttgactattattttaaaaatactcttatttagtggtaatgctgtttactcgaatgaacgaaagcggaggatgatgtcgttgccgttgtgcgtaagtgggaagccgaggatcacgatggtcacatataatttggcttggactggaactctttgtgaccacagcacaaacgcgagttggtagatccccgatactcctagtcgacgtcgaatcagcgcaaggtagatggcaaaaaagacgctctccatggcgcaagtaacagaaggcggtggatcgttgtgtccaaggcttcgggggtcgtcaagtaggcgaaagtggcgaaaaagtgccgattcttgaggtgaaagaccgcctgcaagtagaccactacatatagatggtacgtcagagtaaacgcaacaaaggaaggcattgatacgttcttaccgtagaatagcgtcatggaaatgctgccgtaggagcggagcagaaccatctcggactggtgaaaagtggaggcaaccgcatgaattacagcttctttcctcgcggattgcccttcttcacgcctccaggcgctaggatcgctcttggatcgcgggggcttcacgacagaggagcgaggctttaggtgaatcacccggtcggactttggtctggttggcttaattccatcgccattccacggcataattcgtgccattgacgctcgttgcactgcgataactgtgggagctccaacgttactgcgagggcctcgctttgtagcattcttaggcgcgttgtagacgtagaccgcgttatacatggaggcagctcgtagcagttctctgtgtaactccatgaactcagcacctcgatacccgagatacgtcgacaacaactgcgaaggagttcgccagtgcaagttctgggcgatacgcagctcctgagcgaaagttaacgctgtctgtaagttgtccgtgtcagcttcctcctcctccttcgctataatcctctcactagtttcgttaattttcttggcgtcagccaggatgtatctgcagttgaagagcatctgcgccgtgttgaatagtgcgacgacggccatcgtttcgtacgactttgagttctgcaggatcatggccgtgaagagcacgtggtacaaatggcccacacagcacgtgatgaccccaacgaggtcgtcgtcgttcttggcaacggaccaactgcgagtttgagtacggggagcaacagagagacccagatctgctgcgaaggcgtgagtaccagaggtcggaaaaaaatagtgcaatacaataaataatcagtttttcaatattaatttttattattgggctagagtagtccccgtacaatattaaattggcccaattactgacaataaattccatagaagtgccttggctggactcctatagtttttgtacaaagcttcctattgatggcgtcatctccagcctccgatgacatcaaaaacagcgttaaccacaccgcatttcgcccaaggcaaatgactggcttggagacgtgctccaaccaactccgcagcctgcaaatacggctccactggcagttcgtatctccatttccacaggatagcaatggtcgccaacaagcaactcgccgccttcttctacacctcgcgtggccaaggcctcttcagctgcaacttatgtaacagcgtgcgcaaacagttggctgggtcaggttactccaatctggtggcacacctggcatcgaagcacgctggctacgaggcaacgtacgcatcgctccaggccagctcggaccgacctcttcaagcgttcggcttcgtcgcagaggaagccagccatctcttccaatgggtccgttggatcatcgaacgcaacatgcgcgtccacgaagtcgaagatgcactaactcgggccattagcaagctccgacctgtgaccgccaaggccgtcaagaagtgcatggaggaggtcgcaattgaagtcggcgagaagctggggaaagagatgggaacgctcttcgccctgatgtttgacggctggacccacgctggcattcactatgttgctctctacgccgtctacgagacagcttgtaagctgcgcataccgctacttggtatgtctctccttgaagatggcgatcagacgtcagacgcccacatcaagctgttcaagaacatcctggatgtgtacgacatgaccagcgacatggtggggtttctggtgggggacgactgcgcaactaagcagtccattgtaaccaagatgggtatccccctcgtcggctgcgccagtcatcgtttcaacctggctgtgaacaagttcacggagccgtatggcgacttactggacgaagtcaacagccttatggtggaacttcgtcatgaaaacaaccgtgccgagctgaagaagtacaccgatctcgtccctatcaagcggaacgtcacgcgttggtcctcgacgtttacaatggtggagaggtacattcgtattcgcgcagagatcaagacggtcaacgccgtggaggaaatggtcccaaccggcgggaagcaccggaagttggtcgcgctatttgagcacctcaagaagttcgagagcgtctgtaagcggcttcagcgcgaggacaccgatatgggagaggtacgcctgatgttcgactccctcatcgcggagtaccctgtcctgtcagatcatctgaagtcgaccgccaagatcgtccatacgcctgcattcgaatcgggtgttgtcaaggtcatctctagcacggctctatcgtccgcggagacagcggctttggggcggttcgagcaggcacaacccacaggaaagaagcgcaaggagcgggaagaagactacgcgactatgttgctcctaggcaagggaaagaagaggaaacaagcgccaagtaccacacgctacatgccgctcgtgaaaatggttcctccgaggtcaaacacagtcgagcggcttttctctcagtgcaagctggtattgacaccgcaccgtcgatctatgcttccggccaacttcgagcagctggcgtttctccgggtcaaccgcggcatgtgggacgtttccacagtagcccgagttagcaagcagcagggtagctaaactagcagaggcattgatagtggggagcgttctagctacataactcaataagaccatccctaacattgaagtttacactcctcatatatttagaattttttgaaattatggcacgacactaatgctgtattttcaatccaagtcaaatcgtagttatgtaaccaattatgtccgcttttcaacgcaggtattcccagcctcgacagaggcatattgatgaagaagatgcatttcatatcgagcgtatgcctatcttgacctgtatccccctataaaaagatatggtcggcccgaaataaataattatagatcaattctcgtttatcttcaacttacctttgatgagggtaaaaatatactgcttgaaatacttctacaacagctagccaattagtacgcacttcaacacacgtctaccttagattcttggcttactagtagctagctatgcacttgggaaaaacaaagatgccgaagaagggcaagaggctcaagcaaattgccgctgtcgcggcagctaagcgggcacgcgaccggcaggcacgccaccaagctcttccagcccctcttgaagttctccgacaagaatcgctgtcgacgccatggtgctgtccacgtccagccgtggacgagagtgatacgacttcgttagaagacaactcatccgacttcggcgaaggtcccaatctctgcacagtagacgcgacctacgcgaaaaaaactaatccagcaggtgccgcttattattttgttggctgggtgggctatgcggagctaacatggcagcccgcagttgacctgcctcaagctctcatcagtgagtttgaacgtgctgagcttggtgtaagctggccggtcgattaccgagcggtgattccaattggggttcctaccggcatcagtggcaggggtagacttgccaggcgcaccatataaattgcaatataaattgcgggaatttttattattgtttgctaagaaattgcagtgtttattagtgcttcgtgtcaggtgcaatccaatatgatactgtattggcggacctctggtgagtaccgtgaagacggcagtaaatactggataaacaaggatcgggagagtctccattccgagccattggttcactttatcgcttagagcgtggaattcggggttgtcaggtacgaggtggaagaagatgaagcggccgctgatggccatggggagaatgactgtgaactggctgaaagggacgggaaatgctccaaaggcgagcgaaatgacgacattggtgcccaaacagatcacagtctggaagagcgtgtacactgcaatcgctcgcattgaaatcatggggaaatcggggacgcagttcaacttgagcagcactggggcgatactactgcagaccgagaccaatcccatgcgcaactggaagaagcccgacctccaaaacccagtggacgggtcatttaaagggatgcactccagtagcagatttatgcttagccatagcaccggagccaggataaggatggatagtacgcgtacgaatgaggtttctagacggaatcgctcgaacgcgtccagcttgctgacggaggactggcctggtaatcgaccagcaaagtggccgatttgccgtaaaacgcttgcacaaccggcagcaacacgcagtcttgttagcggaggattcacgagcgaaggcgctattgcagtcatgcgcttccgtgtcgactggtacagtataatttgatgaggctacgatacgagagagtgaaaaaatagcctggatcagtcttgaggttgatcgttaagtacattgtctcgctatttgtagttgttgttgtaggttcacttagcaggatgcgaggggagaatgatgccgttgcctgtgtgaaccagtgggtaggtcaaaatgtcgaccgtcagctggagagttttagctggatcgagttctctttgcggtctgagaacgaaggcgagctgataaatagctgacacccctagatggcgggtggcaataacaagctggatgcccaagaagacgatctccatcccacatagcagtaaaaacctcgtaacggagatccgaacgacctcaacggaggcaatagcagcttgagtggcgttctcgaaatgtgttatgtgaattcttagcgaattgtaaaatgattcatgcttgggtaaagttagggttgatactttcttgaaggagcttcatgccgttagcgcacaatgtttagtgacaacaatgtacctcactgaaaacttgcgcgcttgatgcgtgtcctgttcttcattacccacttacttcaaaagttatccgttaatccgtcttttgactccaaaacatgaaggtgaaaatgaacgggttttgccgcatctaataactgttcatcgaagactatgtaagcgtctgccgacggggccgccgattattttttcggtgctctttagaatttgctgtagaatgggttatttactcttcaagcgggacctagtgtccaggtccatcatatcgtagctgtttgccgcacctcgcatctccactctcatttcaatcggtgccgggccgccagtgacgcctccttgtcgcttttcttcaggtatggtatctcgtcgccccaccatcgttacgaaggagtagttgcttaagtgaccataatgcccctcaataaaaaaaatcgttacgaaggatgcaacgaagtcagtgatcaaagcattatttcaccgtatttccagatttgttgcggcatgggtctcttgtccagtaatcgtcacattcttacacgcgaacacaaatcgtcgtagtaaatactgagagcatctccaccggtgctgagtaaaactaaaagcaaattgccctcagatccgtgcctacggcacaaccgtgctaaagacagtgcgcagccccaccggccattgagactcgcagcgagcgcgttaaagctctttcggcgccagcaatggggacggcgagtcctagctgtatagccctataaagatgaaaacggtcccggcagcccattgaggaagacccagggatgacgtagcaagggcgacactgcggtctgtgacccttgcgctgcttagaacccttgacttggacctactactggctggtcgacatttactcaaccttttactcaaagcctcctccgttggcaaacttgtgcaaaaatttgatctgcgtaaaaatggagcaatttgctcagcacttactcaaaccggtggagctgcacaaaactaaaactattatcaaatattgacagaaaaggggtaaaatttagttttactcacgaccggtggagatgctctgaatactacgttcactaacagtattgccaataaagttgtcggcggaggtgagaaagatagctctatagcctactacgagtatgtagtttgcacggataacagaagcccgcatcgagggtagcccctgcacgtaaccttcaataagtctgtgtaataccaccaacgtggtaaataaagttgttgtactggtgtgtgctggctgctgcaatttggtcggcaaaatctcaagcccaaggaaaagttatggcggcgctatatgctgggtccacaaagcttcacgaaggcgagggtgcttacacagtggggttgagcgagtggtgctggcgcaggtactgcactgcgtacagcttccaggtctgccacaagtcgctctcccgggagagactggggtacttcttcaggttgttagcaacaacggtcgggttcatcttagcctgcttccagaggtcgattgttactgtcgggttcgacttagcctgcttccagaggtcgattgttactttggcgctcggtaggctgttgatctccttccagatcgcagaatcgatcttgctcagtttggccaccgtttgagccttagcggccgccgggttcgccagaaggtcatcaatcttctgcaattgaggtcctcgctcttcgtgcgcttcttgcttcctcaggaatctgggagtatcgccgaccacgccaggggaggtcatcgtcgagcgcgtggtctgctccgacgttgatgccgcatcgcagctagcgaggagactggccatggccgcgaggatgacgaagctcaggcgcatagtgaagcctgggtagttggttggtggcttgaggcttggagcgcgagttgtaaagtgagagtcgatgggggctgagcgcactgaagctcccttctcctgtggagagacggctgcgcagggcgagaggcagagtcacatcctcaagccatctcctacacgatacgatgaccccaaccccaaggattaatcgctggctctaataggtatcccaattctcatagcctgattattttctgctcgaaagaagagcaggccaagtcgtggaaagtacgcaagcagaaaacaaacgatgcccgcactacacttaacaggtactgacagggaaaaagtgctggagccgatcgcaagtaaccaaagccgtgtctcgagtagttagtttgtagtacgtgcgccccgactccgttcatacgacgaagtagtttctcctcatgatcccaagtcaaaccgaagactcctcctatacgtacagtacagtaatatcagagaataaccatcatcatggttccaccatcgttgaacgcacgattactgtacttaagtgtctcgagatttgaattcatcgtgttcccagctggagatgacctctcatcaactctatttcttgtcttttgattggtcaaaatagtttagttcacaacgtgacaactggagaattaccccgtctcctcctccagctgccagagctggaggaggagctgccagagctggagaaggagaaagtagctggagattgaggcagttcagccgcacacacaatgaacgaagaggaagctgtactggttgctacatgctcagctgccgcacagctaaggaacagattcgtaccgtgacctcactgcactttgagcccatgctacagtcagccgcgtatgcaagttggtttgaagacaatcttcgctgcaccaagccaactttcctacgtattgccggtttactacgagatcaaggtgttctgtttgctgctgccaaagtacggcagcatagctttgaaaagaaagttgcagccgtgtcaaaacgagcccgcagcagggcatcagctgctgcagtcgtccacgcaaaggagggttgcttcgtagcgatagacgtttcaccagtattggccttcttcttctgattcccaacgcggcgatgtgagtcttggttgcgggctgacgcagctacaactccgagcgcaaaaagctggctgggtgtctctgaatgcggcagcgccagcgaggaagtgcgggcatccagctccgtttgagtagtggccggtgtcgcatacacagtctgggcaagagcaacatcagaggcaggtatgtccaaactggtagcagccagcacgaggtcgccactggctgacgggaacggaggcgcagctctcggagcgtcatcggcagcttggtccatcttgccacgcgtccggtgtctctggcacagtgttcccggccgacgaagaacagcaaagtaaggagaaggagagcgagtcgcactgtgattggctaattttacctagatgcgctctgttgtagcgaacaagctggagatggagatgcaccaactccctgcagatatccatctccagccgtacataggcttaatgctgtattacacattggtgtccaggctggctaccgcatcgcccctgtcccaagcgaagttttgtcctaagcgaatttctgtattgaccaatgagagagtcatattatcgacatatgtttgatgcaaaactgctgtgccaagcacgctaatcatagacggatagcgagcacattgaccgaagaacatgtcatgattcgcatcaacgcaccacaaggtattcaaatatacaaggaagctcgagcataaggcaaatgacttttattgcacaatatatgcagacgggcgcgtcgccgagcacatattttgagtcggatgatctagtctatttactaaattttagaatctaatcatttggccatgaagctaaccctaacgattagaacgtacattgaggttcgcttaggacaggggcgatgcgtatgtgaagccacatcgggtagtatggagcacctgtactgagcacgattggtactcgagttgcgtagttgaatactactggtagtagtacttggaaatcatacaccggtaaaaagaagggtgcgcgtattgagaggggctgtagtgggagggttgtagcctacagcagcacatctcgtgggccacatccagtgcatgcatcttggggtgtcgcaggctgtgcaacgcaaagtcgagccggtaagatggcatttgggctgtgcattgtaatttaactgaactgttattaaaatttactgtacagtagttacgatacgaaaacgctcaaccaaaataactagacaagtgtgtatccccaggccgtggaccacggttatttatgcttcaccaacagggtagtcgaatttggactccgcgaccataaccaagcatacaaccaagttgtccaagcagatattactacactccacgacaaaaagatatggacaccaccaaaagtggctgtaacttcgtcattttttatcgttttaaggtgcggtttggactagagttgcagaacacgctgataaaaatctgcacgctgctaacacgcgcgcttttgcgcttcttcaggtagctcacatacaaatcactggttctgcccagatgacaaaacttatggacagctaatccccatacaaaatcctatattaaccaaaaccccttacaaatgatacgacttggactttgtatggggcgacaaaggaaccagcctcacggcgatactcgcgacgttagacaaagatctgatggcattatcgtgtactagaaggtgtgtttagtaaccagtaataaatacatcgaccatcgcacaaaactgagcaagtagtaagcgactgaaatttcgagtggtggctaccatgtattatctgatgatttgcgaggcacgttcagttgcatcctagttagtgccaatttgtagctctgtatgctgttatctcttcgagatacgattgtcttctccattctaaactgttggtcgatgatatatggctcagtactaaggtagagtggataaatcatgggttcctttgtcgccccataccgtcaaaattccaacggggttggactgcttccaaccaaaaccggtctagcaacggtactaggttttttgttcagctgatatttaacctcacgaccaccgattggattctcggccaacagtccagaagcttccaggttagtgctgcgagtcgtgcaacactgcttgtgctacctgtgctgactgtgctgctgttgtctctgcgtgtacacaggcgctgctggccgctgggccgtgtgtgctgctgggccgcttgctgctgggcagtctgcgctgctgggctgcgtgtgctgctgggccgtgtgtgtgctgctgggccgcttgctgctgggcagtctgcgctgctgggctgcgtgtgctgctgggccgtgtgtgtgctgctgggccgtgtgttgggttgcgccggtgggctctcgtggcgtgtggctcaagtgaccgagggtttggacgagtatggtgctgttgatggatgcgacttacccgcacccatggagctcgtgaggtagagctccaggccttcgggcctggaggatcgggttcaaaccccgacatgggcatcgagtattatgtgtttttgctttctttttggacaggtcggctaagagagtgcgtgctactcctgttgtacgtattgtgtatcttattgactggttagtgtgctgcgtgtgcatttaggtgaagcgcaggaatgacggaagggcagaattgggtgtcgggtcgacgacttcgccttcatagtagcgctcgcgaaactggtcaaggaggacggaaaggtggcctgctttgtgaagcgcacgcatgactttgacgaccgagccaacggctacagcctgtgagccttgtgcagccaagtagtcaagggtcttcttctcggcttcgactccaacagcgtggacctccgccttgtacgctggcgaggccggatccagcttgaacccagaagataagcagagcatcatgaatgcaactacgtgtcatgactcgtgaaggatggctttgctaactgttgttgattcgtacgtgcgtggtacagcagtgaaccattcgaaccacactgtcgatagcgctttggaggcacgtttgcgcgcgcgctttggctgcgactgctcaacgtcttcgtgctgctgctcggtagtgtttgttttcttgtcaatggattctgcgttcgcccccaaaacagccagcctttcctctacgcgtgtttggcagagcaatagctcgtcaagctgctgcgacagcttttcgagaacacggatcatgttttgagaggactcggccgctgtttcttgtttctcttctgcaggtggattgaacgcagctcggggggtgatcgaccatgccaacagctcggaggcctgtatgttgaggacaccaagggcttcatgaatgcgacggacgtacgggctatccaagcgatggcgttccatctcggggaagtgaatgatcaaggtcgccatcaacacttcgagcacctgaggatccaagttccaagacactgtcgggaaaccagtgacagcagcgaagaggagatcctgcagcttctccacgcgcgctcggacggctccgtccagggcggtaaggtctggaagtcgggcgcccgcttgcgggttccacccgctcaattggcgcgcaacttgttgatcttcgtgtgttgtgttcagcatgtaggaaaacaccttgctcacgcgcgacatattcgagcccccgcgttcaacaacccagttcgggctaatgcgactgtcggcgttggcgtgcatggccccacctcttctgaaggagtgcgaggtaagtcccttcgtgagtccactctcctttgctgctggcagtccactaaccgtgactaatagtctattgatataagcttgggcaccaggggccgagttggctcgacgtggctgtggagtcttgcatgtaggtgcttccgcaagctcgcggtctagctgcgcaatcagccccagctcgccatcgtcgttttggttgttggacgcggacagcgcaagtacggcagcaaattgcgggaagatgcgagttcctggagcgggttgaagggcgagagcgacagctagcacgtgtaacgggcacgtgaagggatcgttaggatccttaaacggggagattcccagttgcgaagcagtcttcacacgcttaaagcggagaaatatcataccgcctagcatatacgcacagaattgtcagcataattcgtggggttaattaatacaaaaattcaaaatcctgcacgattcgtaccggggtatacacacagctgcgctttctccaattgctcagcctcagaaccacgaccgtagaggtaccacatcaacgccactagcgccgcatccaggtagtcggagttggcggaagcgtgcatgtagagagccgagatgatagtctttatatctttcttagtacatggtggcgcttgtttcgtgacaccttgctccggcctcttttcacagtaccgatctagagttgatagcatcttttgcagcttcttagctacacattggccctgttgcgggtacagatccgccagccagttcttaacattgccaaaataagatagcacagtgttcttggacagagctactccttgtcttcctacttttttcactaagaaccacccatacttatccagaatgacaaacaaactcttacctgtgctgtccttagaaatacgatcatgcacttatgtgagcgtcacctccttcttcgcaaggaagtcttcgaaggacttcacagccgtcgctctgcgtctctggctgttcgcaggaactagcgataccaccgacatgcctgtgtgcgtcggaacgcagaatggagtcggagatgagctggcaggggttggaaatctataaataattattctatttgtagttcacttgatatttgtatggcatactcgatatcaaatcgcgtttccaaccagatattgttggaatgttcggatcagcggttggcagtcattccctcgatttaattggtcggaattttaagcaacggtagtgtctattggttgtaaatgctatgaatcgcagatgacacactcctattggccggaagcaccatacaaactttaaggtatttttcaggggttagaatcgcagcgatatgctaccatacaaagtccaagtcgtatcatttctaaggggttttggttaatataggattttgtatggacattagctgtccataagttttgtcccctgggcagaaccagtgatttgtatgtgagctacctgaagaagcgcaaaagcgcgcgtgttagcagcgtgcagatttttatcagcgtgttctgcaactctagtccaaaccgcaccttaaaacgataaaaaatgacgaagttacagccacttttggtggtgtccatatctttttgtcgtggagtgtatatttggggttttcaaagtagcgattttttggacagatcttttgcaatggatttggaaaagatcagaccaaaaatcagacaaacgatgagcctccggaggctcatcattcgtctgattttttgccgagcttattttttggtgacggccaaaagtcatccatagagcgacaccaagacgccgcttgaagccgacgcagagcagcaggccgggcgccgcgcacaccaacatgatgccaaagacgccgtgttggcgcgcagtgccttggtcagctgctagctgctgctcggtttacgagcggaggcttcaagctgttgctccggttgcgagcattggtctccagcttgaaggaccaagagcaaatccttaggtcatagcaaaaccgaacaacaacgtcgcgatacgacgctgggatggtcaaaacatctgacccatcctttgcaaaagatctgttcaaaaaatcgctcctttgaaaccccctattggttataaccaaccgtattaatagctagcaaaacggcatgtcctctaatcagttcattaactactttttctcggcgccatggtgtcctctacagtagttgtcgtcatcttgtagtgaaggcaaatcactgcaattttgtgagaccggggtgccaacaaacaccttttagggtgaaaacgaaacgagatgcggcgccagcaaaatcaaacgggctccagcaaagagaaaccgcggttttggggcgccagcaaacagatttgcgggcgccggcaaaatggatttgattttgatacaaagccaggggtcgatccctggactttaaccatacagaaaaggcggcccgttcacaggtccatgatacactgtaactatctccgagccccagtgaattacggcgattccataatacatatattgtgccttgcacgctttctgtccaaacaacgacgtaattcgttgttttagcaaatcacggtgattagcccatcattgagttaggaggctaactcgtcgatttaagatagaatagctgctaagacaacgagttaacgttgagttatgctcactttcgttgaatggctggagtaaatccgacaatactacggccctgacattctaattctaactcgctcactttgtctgattgctttctagtcgatgattgacatgcgttggcgatctatcgtactaaactacgtctacaatattgaagaacatccctgtttttatatcgaagagctgcaagcagctttaaagtcagcgtttcctgcacatccaaacatttctagtagaagttttctactgctactatatgccgtgctctgaaattcgagcttggtttaacgcgaggccagcgaagaagaaaacgtccccgccgaaatcggtgcttacttttatgcaaggagttaccaccattctatcggggaccatatcagtttgttttcttgcagcgacagccgatttattcttgcagtggcaaccgctccgttcttgccctgcgttgtgtttggtactggcggttgattagcttaactttaacttagagttaggctgcgagatatgatcaccgggaaggatttgctcgttggtttagagcccttaatcgcatgccaaagttcgtgcaaagcacaataacacccgtgttaatatgaatcaaagcatactgtgttttacgtgtacatgtacatcggtgcctccagtaacgaaaagactccacctgttggcaccacgctcttgcttcagaatctagtagttcaggtcggcataaataactatatctattataaacattattgttgtagtggagcaggttcctcaaaaaccgttctgcggtcttctcagtgtaatctcacactcacaaacgcaacgtcacgctcttgatgagtagacgtcgcgtaattccccgggacttcgctaacgtaattccgaggacggtctgcaccggttgtagccgtaggtgacgatcatgtcactgaggtcttgttgttcgttgttgttgttgttgacgggcgaggggatgggcttctcacgccgcctcgttgtcttcttatcgctccttctcccggtcttcgcaggacctatcgcttgtctccgcggtttccgttctcggttcctccgtcccgttcttcgccgtccgttcgttcggtccgttcttcacgttccgttcgtccgttcccttgtagcctggatgaagtctcttcttcttgttcacacttcggccctatcgcttgcctccgtgctccctccgttccgcgccgggaaatgcgtccgcgcggtccgtccttcggtcgtactccggtcatttcacttgcgttcgcacgcctcctctccgtcggtaactcggccctttcgcgtactccgccccgacgtgactaattgagagtgccctcctcttggacacttggtgttgggttgagtacacgtggccttctagtcgtagcgcctcgtgcaacgtggtctgcacggccggggtcggttcttctacgcgttgaggtcttggacaggaaagcgggcaagttgcgggcaacaaaggtgtattcacgccttatcggtcggctactgcttgtacttggacttgtgggcttgggcgccaattgcggactagcaatctactgtcttttggctcctccctaccgtgctgtcttatctgggtgtccatgcccttcatcgaggatcttctccattcatctccttgttctggcagcgcagctgttgactttgcacctggacatgccgtcatactggtcttgactatacactgaggggccaggggagcgctagagcccgaaaacggttcaaaaacaaaccggtatgaaactggttacaaccggtactaaccggtatggcctgatcagcttggtggtgtagccggttccaaccggtaataaaccggcatttcccccgaattccgattttccctgttttccaccccctttttgccgatatcttccacgtgtccaacgatgactgcatcagttccgcaaaatcttcgagtcgctcttccacattgttataacaacacgataactcgcgccgacataaagtgagttcacccagattcgtataaagtcggcgcgagttaatgtgaagccacccagattcgcattaactcgcgccggcttaaagtgagtccacccagatgtccgtaggtgacttctgccagaaatagccgtggggtggaaggcgtgctgcaatcaacgtcaaggtccttacagcgttattttctcgttgcgactagaaacgtacctgtaagcacaagtaagtagaactacaactcaacgtataaagtgttttaattagtgtgttctagactaccgcgtgacggccgcggagttggcttacagctcgcccggcaacagtagctatagcgtgacctcatagttcaaaatcgcgacgaacgcgccgcgtccctcggagaatcacaatagcttacaagattacttatgatttctgtacaactcactaacaattgagtcaacctgtagaattatttacagttgatgaaaccgctggcacgctcaacccacccgcacaaagctattattactcgtagtgtggacgtattggctctggttatgatggagctggagggcatatcctttgtctacggactaaatcatgtatttactcacctttcggctctatacgataatattttttaaatgtaacttaaaagtaaacaacacgcgttggtgcgtgcgctttgacgagcaagactgtagatgccatgggttacccaatgtatctatgcgtagatgttatcattgctacgcgtcaaccgttataagacgttgcgatggcaattgaaatggcttccatccaaatattcataaccatttctaacatccaacatcgctgcttcacctgatctactacactagccgacattgtctcgaatacattttatcaatgtttcaagactaatgtctagattaagcacatttctaagattttagctgatactttgatatagtacatcatagctcgttagtgcgtcacatcaaagagttattccactacgtaccaaatgccttatcgcatgctggttcagccacgtgaccatgtttgcctagattaaatcgtatgtgcagtatgtcccaacgcggtgaagtagtcacgtaggcgtttgtacgtacttctagggtggaccgctcacggatagacctaaccgggacgagtttccgtgttcaacaagtacgtgtgggcatgtaaaacgtgctaaagttgcctagttcggttcttgttcaataagttcagcatttcgagggtcaaggaacctctggtaatagcaggtagctctagcaactagcagcggtgcgcagtatcaagtgttgatagccgactaactcgcaacaaactccaattcaaagacaaatctagcaactagacattgctactttatttttgtactcgtacactgcaatgctttcttctagggcaacttgaagcgaatacatccgacagttcatcgccacaattgggaaatagtcgacgcccaggtaattacttctatgagttaaaagctcgtcccctccgtaggcgacaatataatgcattaagtccccgtaaaagaaactcctagccttatcgaattgtgtatcttgattcaagctaccaaactcgatatcacgcattttcgttgacgctatcgcgtgtttccaagagcagcacttacacgcgagggtttgtatatttgtatcgtccctacttcatattttaatgcgatgttgtcatgaccacagattcacatgagcttgcgccgattaaatatgaattccgtcggattcacgctagctcgtactcagttacttaaatatgcgtttttcgatactaattatttcattgcagcagcgtcatatgccttgatgtcccggaattcaacttttaactcgagcggccgacttaaaagtcgaccgcttgagttattgtgagtctggattcaagttagctcgagcggattcaggttaactcgagtgctcgagttattgtgaatcttttcctgtggattcaacataactcgagcgctcgagttggtgcgtgaatctggtcaagttaatatgaatacactcgagctaaattgaatcccggatgcactcgaaagtgactaccaagcagttgatttaatttgcgttctaaatgcaagtttactttgcaacctatgctgcattgaatgcgtgtagataattaatactggtactgatgtacatgggcgttagtgtcagatgcattacgggaggctgttgctgtaagagaggatgcgccgtctacgtattttgctcgcgccctgttttgcgttttgctggattttgttggcgcacttttcaccaaatttgtctacagctgcacagaaagaaggcgcgatttcccctcgagttgacattgaagatacagtaacacgttttatgacgagcgattgatttgacgagcctctccaggccccggtgtggcccatgttggttggccagacgcggcatcgatacggcgcgggcccgcaaagcattcgtcaagtctcaccgaatgccagctgccactctttccattggcatcgatgaatctctccataacttgaagtaaggctattgtgcctttcccaaaccttagtcaatctgacctcaaaaacttactcaaatcagcacgatgaatttctcctcagataattcgtattgtgctcctctatgtgccagatataatattttaccctccactcggaattaagcagcacatgtgcgaattaagcagcacatgtgtgtgcggggatcactgggtgtggtcgatccgataacaacttgaacctaacacgtgaaatacggcatttcgctctacctgatgtttttctctgagttgggctccgatattaagaagtaaggtagctttcattcataaataatgcctctaagtcagatttgtggttccactagaacctggggctcatacagagagggtcatattattttatatacaggtttgactggattcgtttgtaactcgatgaagttagaatacgagagagcatcataacataactttgaaatcgatcatcttagtactttttctcgctattcgaagtatttaattggcatttacctagcagggtgcaaaggaagaatgatgtcgttgcctgtgtgaaccagcgggaaggccaaaatgtcgaccgtcagctggagcgttttagcttggacgagcactcgttgcgaccacagaacaaaggcgagctgataaatagctggcaccccgatacggcgagtgatcagaaagagttggatgcccaagaagacgatctccatcccacagagtagtagaagcctcgtaacggagaccccaacggccttaaagaaggtcatggcagcttgtgtggcgtagaattggcggttcgagagccagaagacggccaccaaataaatcgctggacaagacaccataacaaaaaaattatttagcactgggttaggaaaaaaaaataaaacgcggtgtagttcttactgtaaaacgacgtcgtccagataatcacgtacgacctcagcagaatgatctcgctttagatgcatcgacgacgcgaccgaggtgacaaagtccgttcgattcacactgggactgatctcccgagctgcgaacgcccacgtgttaggagcgcttttggaccgagcagcgctcagaagtgaatggagggagactgcgcgatgggactgtactgacgcctgtcgaattggtgttcgcatttcatgccagggaaatattctcgatagctttcaccacagatccgacttaatcctctgatctgaacgaagaacttcttcgtatcgagccaagaaatcactttgacgatacccagggtaagttgagagcaacaaagagggcgtcttcttatgcaggaagctcgcgacgcgcggttcctgggccattttcagtgcgagatggaaattatcttcactgtgttgttcagcatcttccagcttttccttcgctttctgtattttgtagcagtcatccaggatatagcgacagtttaacagcgtccggagaacccccaaagcggcgatagcgcccatagtgctgagcgacttggagttctgcagtgccaacgcgatgaagagcacgtggtacagctgccccacgcagccagtcatgacattgatcaggtcgtagtcgtcttttgtgatccaccacaaaacccgacgaataatattttgaagtagtgggagcaggagggagacccagaactgctgggtcgacgtcaaagccatgaaccagacggtgaacgctggatacacgaacaacgggatcatctcaatcgtgacccacagattcactttgttgctttgagcgtggaattgtgggtctttcggcagacggcggtagaacatgagtcttcccgctactgccatggggataattgctgtgaacagactcaacggtactggaaaaacacccgaagcgagagagattagggcattcgtgagcaggaaaatggcggcttgagacacagcaaagagcagcagcatgaatggggagctcacgggggatttggggacacagtcgagtttgatcagagacggcatcaacgcactgatcatgccagtgaagaacatccgcagttggtacaacccagagcccgcaaggcccgtcgccgggtcacttagagggatgcactcaagaagcaagttgatgattaaacagggcatcggggtgaggagaaggatcgcggccacggatttcggagacgtttatcggcgaaaaatttcaagcgcgtccagtttgctcactgtgcattgccccggcaggcgatcgagaagtttgtagatccactggcccatagtcacgagacaccggaagacggatcgaccgagtcgcattacgaggccatttcggcttggggacggtgtcactgctaccaccttgaaatttgacccggtacgctggacatcgacacgtctgacactacgagcccaacgcgtggacacatctcgaggcattgcagccacttcagttttgatagtggagagggctattttcgaaatctgtcctcgccaaaaccgatttttttttgctgaaatgcgccaatccgggactagatgcgtttaggcgaacatttgcaaagtcgcctacagtattgtaataatatgtgaatgttgttttgttgttcacttctgcgttgctctagcaaccttatgcttaggggctcggcgcgaaaagcatgaggacgcttcttgttttcgttgacgcggtccacacttatccgtgttaggtcggggggtatagtgtcatctccgcgcatgatagctgcagctattatgggccttgtcaattataggtaaatttgtacttctaaagactaaagacagcaaaggcattctggtgcttcacatgggcgatgacatctgtatcgcccacaacttcgggcgtccagctctctcttcgtcctgtcagcaggggtgttctgtatttcaaagctatcagacgatggcttcgacgtgttgcggggcgtcttcctgggggctacaccattgccaagttggacacattcgatggatttcgagcagaagtcacaccatcacgggttttatctattttactcctaactccggccccgtgtttcctgctcaacatcagcatcgaaagcatcccgttggctgatccagccacaggattccgagggtctctcaacttccagatccgaagctacctgtcgttgatgtttatgaccggaatgcccatgttcatgaaaattacttctatccccgaaatgtcaacggcctcctggaagttcgtccttgcctacgggatgattacagcagcggtggcaattgtgcacaactctgtcgtatcggtcgtcgcaggcattttccccttgccatttgcccaatttgcgcctgccggtccgatcgtaatcgttggatttttgcttagtcgcctcctcccgcacgcccaagacccagagattaaacagcgcgttcaaacgatcgatctgtggctgagcttcgacatgctcccggtcttcgtgtaccccatcttcactgccgtcttcatgtcgctcaagccgacgcagcaattttggttgtcactgctgctcccagtgatgaagcgtttgctgcgtcatgccttttggttactgctacggcaagacccagatatctctggagcaatcacgtgcagtgtcggccacctctatcacgtcctcttcacggccatgtgtctgcagaatgccaagtcgctggaaactctagcggccgtggtggtcgtgaacgtgttccacatgctgctcaactgtcgggatattctcaaggacgcgaataaagtgcaaaaggctaagcacgagctccgtgctttcgacgtagcagtagcagatgatatcgtctcggcggcgttgactctagctcaacaggagccactaccggagctgttgcaccggaagtcaccgtcccgaatgttttcaaacttcccggagtttcaaggtgttgactttgtgaaaaggcatcgcgaagtattgcaacgcaaacgatcactaaccaaagttggtggcccgacggttctgaacatcactatgctggggcggagccttcatcacgctttttccaaatcggctccaagaggtaccgatcagcgcacggggggctgttcacgggtgcactcaattcggtcgaaaggggatcagacccgtcgacgcgcagtgtacgttcgcaacgtcacgtacactttgcaccagaccgagatcatcctcttgcgatcgtacatctccgttaatgtgctgatactctacggttcgtaggctgtgcagtacgaatcttcgatgctctttccgcttttgcactgagatactgttgcttttgtaggtgtctacctcctcatcgtcttctggctgcccaaccgcaaatacttcgccacaatgaccacaatgacgacgttcttcgcagtcgtgaaaatgatacgccacttgctcctgctcggcatcatggaagtagttttcctgggtctgtacctgctcttgatctcgcgtcgacttggagtgtcgggcgtgcttcaactcgcgttcgtgctctggtcgcagcgcaagctgcttcagtcgaaattcttgtgcttgtccgttattatcctgggcttcccactagagcactatggcaacagcatcatttttaatctcagaactggttagcgtgtaaggacttgtgatatcgatgcgtgcacatgtacaccggcagatactcacgttggtaggatccaaagagttgccagcattttccaacagaaacggtcgacatttcccgaatgtgtggagctttggcggaactcgcacccgcagtttcacttgtcatgcatatttttgacggagatgtatttcgcagcaaccagaatagcaagctgcagtactctcgaatctgggtgaccgcgggaagcttgtgggctgttcatccttccccccttcgtggacaatgagggtgctaccccttgctgtgcttatgtatcttgcaagcgcacaacccccaactgaagacgacatgatgagtgaccgaactccagctgccacgccactcgagattggcatgggaccacaagccgctgctctaatcgactgcagcaaaactctcgactgcgagctggtcccttacgatcccgtatgcgggtccgatggcgtcacgtacgccaacgactgcgcgtttgctgcagcgttttgctcaggcgaaagtcacacggacacgctcttcatccaggacgtcggcgagtgtcctcctgttaccgacgacgtcgaagatcaagagggcacgccgatcatgccgctcgctgaggtacagaagggggatgttgaccacgctgaagtcgcggtcaaggcgaacactgaggcgaacaccgacgtggacttgatgacgatattctgctctctcacgtgcaagttgacgcctgatgaggtctgtggcacggacggagtcacgtacatcaacgactgccacctgctggcgtcaaaatgtgaacaccccgagctggaaaaggcctcccatggcgagtgtccaacccttgagttcaacgccttggaggtgagtgagagcaccattatcaacgtcgcaacccaagcaccggagaaatgcaacccaatgtgcgagcgcgtgtacgacccaatttgcggctcggacggcgtaacatacgcgaacccgtgtcttcttgaatacgccgggtgtcgtaaccccagtatacagcccttcggagcagggaagtgtccaccaaacatgcaggctgcgcgcagtgaaagcctccctgccagcaccaacaacggaggtgagtcctgcatccctgggccgtgtccgtacacttacgcgcccgtgtgtggctcggacggccaaacccacgacaatctttgtctctttgccaacgcgagatgccaacacccgcacaacgctcttgcagtcgtccacgacggcgagtgtgacgctgacacgaagctcacttgcgaaacaatgacgtgccccaccttcaccgagtgtcgtgaacaaattgaacccgacggcgccatcgtggcctattgtgcagatgtttgttcgcctgatcgctgtagcgaacgcgaggactgcgagctggtggactccgactgctacacggcgccgtgctcccccatcgccatgtgtatccccaaagtcctggacgggtaacggagctattaggtagatcacttcgacacagatttattcttcggtcaaatcgatcatatccacggtgcagctgctctttcggagtttctcgacaccaagaatattttgtgacctccttccctcccatgagtcaccttcctccgtatcctcaaagtgattctcgtttgcatcgtttgcgtagtctagctctctgtcctcttcaaaccagccatccgaattgtactccgcagcaagattattgttggaagatgcagcatcaatgctgaccgcatcccctcgatcttccctctctctttccttcgcagaaacttcaggggcggcgtttgacttttcaggacgtgtcgatcgtatctcgtcggattcagtcggtgtagcagtcgcaactcgagctttcttcttccctcgctttcttctaccagcaccttttcgcttcctgcttgctttctctgttccacgatgctgcgtcaggagagaccactccaaaagttgctgacacgccgggcactctcccctcatgtcgaccgcagcagcctcctcctcttcattctcttggtctttcagtgaccggaaatggtccatcaaacacgacgaatggcagcacatctcgcatccacgatggtagcagcccaccacttctccaaggctctcaccctctccagtctccgattccgtctcctgatcaggagacaattcgtactcgcaaataaagcacgtggctgcagtcatagcattctcccgttcaacgcctgcaaacgtctccaatgctctgaactcgaactttgcagcagagcatctgggccccagccctcgagcgacctggtgcatctcctcgctcgtgaaggtcacggtgagattcaaatccttgaacggctccaggttgaccatctccagcatctccagcatcttcctcttgacggaccgaggggcccccaggcctttggacccgcgcagaaacttcaactgctccctggtgattttgctcacgagcggatgctgccacacccactcaactaggaggcatcaaccaagtaacccagttagaactattggggtttctaccagtacagacactatttcattgcactcacactgcatagctcgaaacttgctcggaaagccgtgcacgacggcgatcatctccctgcacgaaagagcactgattgttagtcacccattatagtacctttagaactgacataacctattgtagtactttaccaaggtcggaatttccgcgtccgcttggctccattcgcgagctctccgttgtgctggcgtatacgccgtgttgggtccacagtgaagcccacgtacgtgcagcggaggcgctgcggggcctgcacgggcgtcagcaggtagcaggcgaagaagcccatggcattgagctctctcggtcttgcgattcgtccaaatccgtcgcttcgtttttgtcgaatcacacgcgagctcacttttagcctccccacaaatccaagtcacttcatttcactatggccaccgtcatcgccgagtacgagcgcgccgtgaaggccaaggcggagatcgaggcggaaatcgaggccgtgggcgccgaattaacctcgggcaacaaccccggcctgcatgggccgctggtggacgccgagggcttcccgcgcgcggacatcgacgtgtaccgcgtgcggcagctgcggcacgcgctcgcgatcaagcggacggatcaccagcaagttatgaggaagatcgaggagctcttgccacagtgagtcggcggtcttttgtgtgtttaaccttggaatgagtggagttaacctccgttttacctcactaccaccagggttttcgcggcccgcagcggccctaaggcggaggagacgcccacgacgccgcccaaggccaagcaagtggacgcgacgctgcagaagctcgaggccgagtggaagcaaaagctggcggtcgtgtcggacgaggagagacggctgcagcccttcgcagtggtggagagcgtccagccagagtcgcccgcccaagccgcggggctgcaggcgcaggaccaggtgctgcgcttcggctcggcggacgcgagcaaccaccggcagctggcggccgtgcgggacatcgtgcagcgcaacattggcagcggcatccgcgtgctggtgcggcgtcaggcagagcaagaacttgagcaggtgctggcgctggcgctcacgccgcagacgtgggcgggcgctggagtgctgggctgtctcctgcagttaatgtaacctgtcagcaatggttggcgcgacaatgaatacgactaccaattcacacaagacagggacaataacaaaagcgtttccgagtcagcaggcgtggttccattacagacatgtggttagtctatctagccagcagtaagcagcggcgccagcagaactcggagcccgcggtggagactgcagcggggcgccgcctgcacttcccagcccagaagcggacgccccagccgtccaccagcaagcgagcaagtcttgagaacgagtccaccatccgaagacagtgcgccctggtcgactccgtctgtctaaagacggcgaccacggcgaccaccctttcggcgggtgctgtccgtcgggatgggggtgacgtcctcaatacgtccgatcttcaggccattgcgagcaagcgcacgaagggccgactgcgcgccggggcccggggtcttggtccggttgccgcccgtagcgcggatcttgatgtgcagagcggtgacgccgacctccttgcacttggcggccacgtcctgggcggcaagcatggcggcgtagggcgaggcctcatcacggtcagccttcaccttcattccgcccgtcacacgcacgatcgtctcgcggcccgacaggtcggtcacgtgcacgaacgtgtcgttgaacgaggcgaagatgtgggccacaccgaacacctgctcgccctccttgagcgtggggccaacgcgcaccacctcctctacttccttcgtcgcggttttcttcgactgcattagcgaggcacaaggtagagcaagaggttagtaaccacgacggattgatacatgcacggattgctcgacgccagggcgagttcgaggcggctgcaggcgcgaccggggtgacaacagagctcagacgctgcgctatgaggtcacgccgctggagcctgttcgcctgcatgcctgctctcgccccagacgccgaagaagagcggcagcgctacgcaccatgatggattcggacttgaaactgggaatgactcggccgagctgcggggcggcagagctccgctggccgccagtcaaaacggaggccgcgcgattggcggataatatggtgatggtgaattggtggataatcgggaaagtaattagccaattgtgagacgtgtagccatataggaatggatacagaaaaggcaactacatgcaaaggtcttgcgtttgtattgagtacaccgactagccgagcgccgccgctacgcggcggtgaattttttgttagttggcgcttcgctcgcaatgctcgctgcgctattggagcagactgcctacgcttcgctacggcagtggcggacccgttccgctcgcctcgtcggctcgctgcactactctatgttagattagtactacagaggccccgcaatatcgtattggggggtcgccttcgcttcgctcggcagcctaggtacgattatgtggaccaccttattatgttgtcacgggcttcacacggacggacacactggacggtctctctcgtagatggttagcagtcttctcattgcattgcctccgtcttgcgctcagtcctaccagccagccccaggaacttgagatagtacggatagtcgggttcagctcggacttgactggggtgcagacgtaccagttgggtctctgcgcgtcggcccacacttgggccttggccaagcgctctgcccgagagccctcgaggtagatcggcggctggtccaacgtgcctttagtgcgccacatctcgtcgttgaacatcttggcgtagcgcatgtacgtctcgaacgtatcggagctgtggccatcgagtagccccaagtttatccacgcgcggtatgtggacgtgtcgtctttcagccacttcttcagggtcttctccacgaacttctggtagtacttgtagctcgagtgggcttctagagtggctccagatagccgctccatccccagcgccgccttgacgttatcgactgactccccagcgttgacccactgcttaatttgcgccttcatggggttcttagagaataaccctctatcttctaccggcggttcggctgcgtcagagtcgatagctttggcggttcgcaacagccttgcgcggtaaattggagcatcaggtgacgagatctcggctgcggtggctagcaagcaagtgaagaggatgaatatcgccaccacacttagttgaaggtgacgagtacccatgacggagtgagttgaatgctgtgaagtgcccaatagaacgcaatttgacctgtgttgggtggtgaggaaaccaaggttgaaggggctttggcgctagattactggcctattacgcgtgtaggagccctcaagattagataacaattacagtgtagatgtgactcaggtacagtgaaattgactatgccaagtaggttatctagttactagattatagtagccgtatccgctactctcgcctacgcacgctgtcgctagatcgagagtactaagtaattaccgtcaccatgagcaccaacgtgctccccctggccttcgtagccgcgagcacctcgtgctccccctgagcttgagtctccttcctccatcgacctccgtcgatcagtcgtcatcgcacacaccatcacctccgtcgcgcatcggcactcggtcgcccctttcgcgggcgtcctgaccaacgccgcgccaatccaccgggaagaccagcaccatctctctcatcgacactcttgacttgtacaccacgccctcgcatccgggcgggctctccgtcgtcgttgcgagtcagcaccagcacttgccctcgatcgtgcgcctctcgtcgatcgcgccgagccgtttgggctcataacctgtaggaagtactggtaatttgcaagcggggtagcaaaattgggaggtggaagcagtcgaaaaatgttaagcatgctattgaagcagtaaactttgcgcatggcacactagtagattgcctgctattacgtagtagttgttggcgatcactttgcctgtggggcaattagtctctatatttttgccggtatgtttaccacatacttcattacttaatactctccagatgacgaactgacgtgccgattctcttagaccagtcgcttagatgaggctgtatgctacaccgaacgctgtaggtacatgcaatgataccaacatcgtttcctttttttctaccgtaattccagttcgtcttaatgattttatttttgtttgaaagcccacgcaacactaccccacgagcaggtagttcttcttcatgttagttcgagcgagcgcaactcacgtacttggctaagtaataatgtatgaaacagaatacatatacctacagtaggtattgtgtttcagacatttccccgttcaagcgccagctacttcgtgttcgtgttcagaggtcctctatttacgtttgttttagcaaacgtagtttaacaactaccagtatactgtagagtcctccagctacaaacaaacttttgtcagctccctccctcagtgtaaagtgaggctatcgctacttaaattgtgtattgtgaacgttagtgcgccttacgctcagggaataagtgatctacactctcccgctactttaagtacacgggaaatgcgtactctcagaggtgtcagcgccgccgactcggcggtacgaatgccaaactccagaacaatcaatacatgtagcaccatatgaaacgattgagccagtttacacagctttactcctatctgatgatcgggtttcgtgagacagtataggatatggtacaaccctttatcggcaaaaggttcaagattaaacgcactcgctatgcaatctaacagcgcgcagtgcatcttcatcgtgaatcgttcatggacgacggccatccgcatctccaccagttcgcagtccgcttcatttcacccaagtgcccgggaactattagatatcggtacagtatgctgtcttctcggtggctaacaacgcttctcatgctgatggcggtctccgtcctcattacctccggcgttaatgcaacggagttgagccaagaccaagttccactgccggtgtctggaagccgcaggatgctgctacgtggcgctacagaggccgacgctgacaacgaagaccgagggggtttctcgtggctgaggcagcagtactggcttgagaccgagaaatccaagagctacgtcaagcaggccttgggtttggacgggctggagggagccgcgctgaaggctgccccgaatttcgttcactacgacgatttcgtgtacgcgcgtcaagggaatattttgaagaactggttggacgagggtctcaccacaccgcaactcgcgaagcactacaagctaaatgacatcccagcgatcgaactgaaaaaagacaccaacaagtacaaaaaactcgtgcgattcgccaagatggaggacgagaagatatttaacttgaggaacagcgacgtggacgtcaagatggtgaatggaggcagcccagcggagatggaagcaaaactggaggcctgggtgtcggcaaggcgccccagatactacgtgagaaagatgctcaatctggacaataggtctcggaagactctcctggggagtaaatactactcgtactacggtagatttttggggctgaccggacaaaaaccaacgcttccgcaaaagcccgcggtagaggcttagcaagcgacgagaatttcattttgatgaggggttgccttccgagaaattgataagtactgacgttgccaagcactatgtacttggcaacgtcagtagtgtattttcgcccctttctgatcagaacggtcgcatcatttctggttccattccatttcgcgagttgatatctgcgttcaggtgaagtttcgagttcactcatttttcgcgcttgtttcttcacgctcgctgagcggagctcaccttggttaagtattttacccaactagccagcgacagaaccaaacttgagtgaaaatccttagggtctggtgagctcttaagcggcgttgccaactcatttgaagaagagggaggggccgagacagaacgatgaatcagcggggcattttgaattcaagcctactgtatcggacacatgtaacaactgcagtgctgtaattacacagtggctcgaagacaaagctaagttgtaggcgcagcttatcgaagatattaacggaaattaccgaataataccccgggcactatttattagcaccctcccattttcaaaacaaatatgctaaattatggatattacacagtataaacatgatttcgacaataaatccataaatatatacttgatctttgtatggaagtaacattgtaaccctgggatacacattgggttacgttttagagggtactatacgggtaaggggtattattcgggaatttacgttatctcacgccatgtaaagcaaatctacagtatactttcacgccatcaagcagcgaggtactatgaacagttcgaaatggcagatgccctgtacatctcatccgcttcatgtatgacgatattatattgtgctttgcagactttttggcacttcggactgtaactcgtacgacttatcagcacgacttagtgataaatcgtactcgagtacgaattgctgtaagtcgtggatggtcaatcagcactatgtagtgcgcataccatctcctgcatgatttagcacattcagtacggattagcatccttttggcacttttagaatgtgccattcctgagccatatcggtttcgaaacaagattcgagcagctcgcattcaaggccactatgatttaccgctaagttcgaacactaagtagtgcactaaataggagggcaaactggatgcaaagcacaatacatgcatggcaactggaggaagaaagtatcacaatcaccaagtgcacacaactcgcgctattcgacatcagttctcattttgctcacaagatctcaagcccccccccccccctgtcgacgcactcagctatgcattggtactgcgtctggctcgtggcgatgctcgttgcttgcgatttactcgtcacgggtgctcaagcagaattcccttcggtggcttcgctcgatcatgctcctctggcgcgcaagcgtgtcagcgtcgacggcgggagacagctgagatctgtccccgactcgagcgagacggaagagaacggtgtgtggtcgtggatcgtgaaacactaccaaatgaaggcgtgggtcgccaacggaacgccccccaagcaggtcatgaaggagctgggactattaggattgcgaggaaacgccctcacaacccatccgaactacgagcgctatctccagtttgagcgcaaggtgatgaaggatgcgatttatgaaggcgttgatacgataacgctctggacgaagtggaatttggggcagatgtcggaggctgaacgacagacattcgcactctacaaggagtacgcgacgctgtacgacaagctctattacgcgaatagaaactcctttgtggacgagctcccgatcttaaccagatcaaccccaggcgagatggaggtgaagttggacatttgggccgagttgattagatccaacaagtacgtgcacgaaatgttgggattgacaggcaagccagaaaaggtcgtgatggccaacccgtactacaaacgcttttttgagctgaccagcagcaaacagtagctcatggacactggacacgtgaataattgagcctgtagtgacgtatcacaagcgaataacattgctattcaccgtttaaattcgagacgtgtattcaccgtttgaagacgatatatatacagtagttttttgctgtggtagatatagtaaagcagcttaagatattacgcgcagaacgattgaatctcactcgtgccggtagatgacggtaaaagagttcaatgtgcctgagtagtagcgtcctccaattcagtaatatgttgacttgataaactattcacattatggtgatgtccatcagacataaaatattggtaaaaacattttagattttagcgcgcctcgggcgtagtcgccataaccgcaacaaatacaaatacaaattagatttcatggatctgactgtgtttttgtatgccttgagtcaataacataaccgatatggctctggccacaaatacatattgaattgacttgagaaaacgtaagtccctgccaccgacgctttaatggatcgctctgattggttaaaatgacatgactagcccttggcagtccgaatgaggggcacgtcgggtacactgcacttgcgggtcacttattaagtccctcggaaatgcggtgtatatctactagacatactatctaggtgaagcatttagtagcatacgcattacagataaagtaggtggttgggccgtgacaaccgaaacaacatggaagctgaggggcccgtgccctgtacgtgccgaacctcgtgggtggcgatatcgatcacctgtcctctctgatgtcgcgctttggattttcatcggactctccgcaatcggagagccacagcgtttctagcacgagtgggcccaggttgctttgtcgtaagttgttggtagacaggagtagtaagcaactagtaactaagtgacagtacagtctccaagaaaagaaaagaaaaacatgaaagctgaagccgtactactactacgaagcttggcgcatccggaaaagggtggcgttatgatttgagttaacacgaacgtagttcgaacaaacagcgccggccatcgcgtgctgcttgaccactatcgcgcagcgcgcttcgtttcagtggcgcgcgcaccgttcgctgtgtactcctgccgatgagactccaccaagtagtggagccccttcactcagggactgcataggtttggccgtgagtgccacccactctaagccgacgtctgctggcgtcgcctcggccgagacgatggagacggtgacgggcaaggaggtgatcgcggcgaacgacaagggctgcgcggcgacatccggctggacgagcggcgcggacacaacccaggagtctacggaggccaccgaaaaacggagacaacttgttgtagaacatacttacgcaaactcttaatcctgcgacactgtatttaaaattctgctggttttagtggacacatagcaggaggcatagatttgtgctcgaggtctccggaaagtagttgtttaactacactggaacctggaggcgaatcaggactgtgcacttaggtagaaatattttgaccaataggagtctccgctaatcgtcggctaccgccgcttacgctttcccggaaggatgcgatcctaatgtccaatagtggacctcagtcaatgtgtcgtactccaaggtgggaatacaccaattccggaaattataagccaatccgcctacgttttggcggaaaatcccatatgtaacttacgtaaatatgagaatgtcaattccgttgaaattttccaaatcgggccgattgcgagattcgcccaacacaaactcataatggaggtcctatagccaatccaaatgaccggggcgattggcgggcgatttggctcgggcgattgcaatcggccggatcgcaaatttcgtctagaacaccaaacatctcttcatgtttactgacaatattcatattgacgttttattcgtaccgttctgcctggtcagaattcgctcatacgcacaacaaacacacggaatgaattttggagatagatccgttgatcaaatgacttgatttcgactccagatttattaatacaagtagtcttataaaactactcggcgaaaagcggtcagtcgttcatgcggtcatccaatccacaaagccgtcgcatgacaacagcggcctgctgggcgagggttctcccccatgtaacgatgatatccttacgctggttacggtgtggtgtgttcgtggaatatgagctctacaagcggtaacagctcacttgagtagcccctaaaccgatagagcagcaaacgtacaaaagcgtttgcatttgcacagagttgatgttttgtgaaaatcaccaacatgtttgtggagtagactagatggagcgctatcgagaaaagcacttctgtactcggtcacacaaccggcgttgcctttttataagcaaagactagcgagaaaacacattcgcgcttgagctgcgaggttctagccgtcgcgtcctccgtccaacgtgcagtccttccgagccacagtatctttgagctgtgtagatgtcggcaagcataccgcttaacgccctaccatctttcaccaccaccgtggagagtgcttcgcgcacaatacttcgggtgcagaagcagcaactacagtacttcttcaacaactgtggtgccgggaaagttgagtgaagctcacggcaaggcccgcggcgttcggcgtcaactcaactggcggatcgaggcacatcgccatttgttcgatggtgttcgacgtccgctgattggccagtctggacagatgacgatgattcgtcgacactcaagctcaagccgtggtgtgtctacacaacaccgggacttcaaggacgacccgaacctacggcgaactttggcctgagttccgcacctaaggcgactcttcgagtcatcgggaggccgtccgagccttcaagagagctcggaagagtcgggtggttacctggaagatccaaaacggacacgtctagactagatatttgtattgaaccataggaaagagaagatagagcagataagtcatttgagcaacaataacagaacagcttttcctcccaaccactcaaggaagacgtccgggctatcggtgagttcccgtagcaattggataaacctgttggtaggattatgactgtcggtggacgcgcctgctagtatcgtagcgtgcgtttacccgtggtcaggccaagagaagagaagaggtggccgtgtatacgaagggcgagtcatcgccgtgtagtggaggagcgagagcgcactccatttatccttcccgtcggagtatagctccggcaccctcgtatcaagccgtgactggctgggatccttccttcctgagggcctgcgaggtttatattgtgtgtgagagcatgccagccttcgctcgtggctggtgacgctggttttccgtcagttgactaagcggaaacacggtgcacagaggaaacatcaacccggcgcaagggaaagttcctgggccttcaggttctaaccctaacaagcccattgaggcatcgggacttggtgggtgttgttggtggctaaagtgtgctattatatgatgtagtgcgtgttcctacacgacacaaccctctctcgtcgcgataagaaaaaaatcgctgtgccctcgatatcatcattcatgtttttttaatcgtaagcacttttctgctaaaggggttaagaaagaagttctaaaatggagttccagaatctaggatagagctctagatctgagttccagctccacgcacgaagggttgggtgatgccggatgcggatgccggagtaaactcaccaacgcagcgcgtggcacgcgctcaccgaagcagtcatgcttgcctaactgccactgccggctccatcccactgtacaggcgcgtgacgaagagcgtttcctacgacggaaacgccgccgacgatggtcgctttctcggcatgtttcaatgataaatgataaataaatatccctacagactgagactgagcgacaggagtcgccagtcgtggggcttcctcggctgtcctttgctacgtatcttctcaaagctgcggaacagcgtcgcgagtgggagcaggttcatttggagctgctgctcgaccgtgtccagctgggcgagcgacacccgctgcagcctcgccgggttcatgagcagcagcgagcgcagcttctccagcgtccgcacggtgcgcatgagcttgtgctcgatcgacgggtccgcgggtggctcggggcagaaggagaacgcggtctgcagcccctggatgaccatgtcgatgacctcgaggtacttgcgccgcagctccgccagcttgcgcgcgttgttgacgccggcgccggcttgaccgccggcttgtcctgcactgccgttgtcttctccagggccactgcgtcaagttcttcttcagcaaaacccattgccgtcctaactctgaggtatcggagtatggcttgctctcttatctctcgcctgatccgaagctcattgttctgccttcgggcttctgcaacgcgtaacgtttcgtccaagaggactcgttggggaggggagacgccatgcagtctcgcatcgacggcgtcttgcacatcttgttgtagctggaccacctcatcttgtacatcctagaagcgatagattggcgaccaaggtttgagcttgtccagatctcgttctaggttagccgctgtcgtctgtagagcttggaagggtccagtggggcttcggggggttggctctgtgtcggtccaggcattgaggaggccgtgggcgtccagatcccgtatgggaggccgctctgccgctagaacaactgcgttctgaccgcagagcatagcgagctcgcgttcctgctcgcactgaacaagtaacgagccatccgtctgtagttagagcagccgtcgacccactcctgcagtcccagcttcccagcctccccctcgacgaacttgagctccttgtccgacacgacgatggtgacgtctccagcttcactgccgaccggatttcgggcgaccaaattgaccaagtcgtccaatgttgcagtgatgcctctcgaccacagccagtacaacaacttatatgcctcgtaccctataaatgtgaaaatcacaacaagttagttgcgatatcgaaattgctacaaacaaaaacgaaaacttaccacaaggtccctccgtgctgaccaaaagctcgtcgttgtggagtcacgctgcgattgtcaggttagtcgatccaggccaagtaattactgcagtctttgtaatgattgccgtgagcttgtagtgtagcatgcacagccggtgcctgcaagaataaaccgcttcacacaccggacggcagccttacaggtaagggttcacatcttgtcaaacagcacgtaaaccttcacgcccttcccgacgagccacacaaggacatctacgaacccacagtcggtgacagcgtaatacgccatccacacctctgtcacgtcgtcacgacaaagctgctgcaacatctcaatccgcacgctccggttggcagccttgaaatggaccgtagtcgcctctgcgagctcctgctcgatggaaacgcgcagtcgtgccagtgtgcttggtgccacgctcgtgtaccttgccttttgcctcccgctcaagttcggcggcagcgagcgcaagcactgcgccaggacggcagggtcgtgaatgggcacgcgaccgctgccgatccttggcttccgatcgataatctttcggatagtagcggggcagcgatcgtagaggtctgcaatgtaggtgacgtcgacctggccggccttcttcttgtcgtcaggaggatacacgaagacctgggcggcgaccagcacaccttggacctcctcgtcggtcatgtggggccggagcaccaccccactggccttctcctcctgctcctgctcttcctccacctccttggtcgtcgctgtgctcgcgcgcgcttttcctttagacggcatcttgttttgtggcgcgcctccagcaatgcagttgtcgataccagggggggcgaagttgaagtgctccgttccaaattgttatgtgcaatccaaagctgcctatcgaaattatcgtgctagcgttttcgagtggtagcataaccattttcgagagggtttcttcacagtatacttaactcaatatgatttctaaacccttccaaaagtggttatgtcacctcgcaaatttgctattgtgaattccggccaaatttgccgaatcgggtcgattttggggcccctgtccaaccgatacaaacatcaagtcatttgccgaatcgccagccaacaaacatacgcatgtcaagcccaatccgtacttagttgggaatcaaggggggcatagccgggcgaccatagtcaacccaagtgcattggcgattcgccggcggtttgccacggtcgattcaatccgccccgatcggaaaattagagtagaactcacaataacactacaacagaaaatggctcgataaaaaattcaggcgggtcggatgatgggtttcaacactatttccgggacggatagtgggtgccactctgatcatatcatattattaaaacaagtcatagtcatatgctatgacgcttcataagtcgtatgatgcagctctcaccacctgcgagcatttacaacacggtggcgggctggaattccaaatgtgttcctacatttggacgcaaagccggcggcggtgctggtgctcgcaggcagtgtgtcgcccatgggagtcgccagtacgccgacggctggatcacgaaccaagggcaagcgacggaagatatgcatggctgaaggctgccagaacttgtcgcgctcgcgaggactgtgcaaggctcacggtggaggtgttcgctgccgtgtggagggatgctccaagagctcgcagggcgacggcttctgccgctcgcacggcggtggtcgtcgctgtggccaccccagtggctgctccaagtgggcgcagcgcagcggcatgtgcatggcgcacagcgaaggtaagtacggcaacagctaccgtggtcggcagcaccggatggagcagcaggaagccgtggtccagcagacccgagtgtgagcgcgagggcaaagcgcacactgtttaccacgatcgaggagccaggaggtttttgtcagcgaatcgactggggcgcatgagccagcagtaccaaacgaggagtctcccctcgcactattgagggagcaagcatcaagcccacgaatgaagtgggcggtctgcttgattaactgggcgaatgaccgacgacgcattgttcacttgtcctactggtagtgcttcggttacgaagtatggacagcccaaccaggattaattcgatgcacctgatatgtggcgcacatgaagtaaaagtatactgaaatcaagtaaagtcagttaataatttcagatatcgcatgaaattcacggaaaagtagaggttttttcggtggagtgcccaactagttgagtaggatattcgtttccagagattaagggtaaacgttaagtacgccggtgccagctctgggatgaaggaggactcctccgagagggtctttgccgatagcagaatgctcggtgttctagttggtatgcaagtggcttgtgcagcgatatttgatctatctactaaagcgcggagcgtgttcggcgcgctgctaccaagatagaattatgctaaagtctaatacaaattcagcactgtgcgcctacgatagcatgagcgatggcgagatgatgaagcgaggctcggtaggtagcgcggcgatgtgcaggtggtgatagttccgatgcggtgcgagtccagctagttcggcgccacagcagcggagttttttaccgtgagcacggggggggggggctgctgcggcgaccgaaaaagctgaactgaggacgaactcagctcttttagattgtggtcgttttgcttctttgtcttcaaggaaggatccgttgtctagatcaatcacagaaattttctgcggatcatcgtacctagtccaaatcactcagtgcgaaggaaaggtccgtagtcttaatcgctcaccatttcccgaaaatgttttggaaccatctattgtagtcaaaatcactcgatatgaactgacacaaagtaagttttcggactgtatgaggaaatatatcgatttttttatctgaaaggttatgccgcttcgtccaagtcaactgaatcaacaacccgttcgcctgttcaagtacacggcaagtttgacagctcggtggagaccaacgacggcggtctggtggtgaacagggaggtgatccacgtgttcgcggcgcgcagcccgtcgcccgtgggacaacgtcggcgccatgtatgtgtgcgagtcgacgggcgcgttcgcgacgacggacaaggcccacgcccacttcgagggcggctgctagaaggcggtgaactcggagccgcccaagaactccacgcctatgtacatgatgggcgtgaaccacaaggagtacgatggatcggcgcccgtggtgtggaacgcgtcgtgtacgaggtgatcaacgaccagttaggctcgaagcggatgcttctcgtggtgctgttggtgctggtgccaccgttggtgctgggggcttcggaggtggcgctggcggtcttggccgagcgggcggtctcagtggtgtcgactttcgaagccggccagtcaagagtgccagcatcgtgaaaaaccactgcgccagccgcgcttctcgaaagcgtccctgtggtgcgcatcatgaacatgacgatcagcatggctggtggtcgctgctgccagtcgcagatgctgcgtatagtatcgatagtgtgtctataatgcgtagtcggcgttttgtattctcagtttatttaattcacaagtgacttagtgcgctgcattgcaaagtgccagtcactacggcaagctctcaaccacgttgaacgcggatgcgtgcaagtatactccaaataatactttcaaatactttcagcactttgagtcgtcgttgtgagcgtgccgacctctattgaagtgcattcgcgggcttgaaatatgcactaccagcccaaacctctagtgtgctagggcttcgcgggggctgagatagcgaaaataaaacagaacagatatacgcacaactaccagataagcagcttctgagtgcaataacccacttgcgataatatcaatttactttcttacatccgcgctgttaataatcaaatacaagcaagctattagctgcaacaacgccctgccaagcacttaccttcgtgctgtaacttcgtcctggtgttgcgtcttcgggtcgggcgtgagaatgcgaaatggttcgaatgaaacttgatgatgcgattgatgcttcctcaccaatagagaccgactagataattatttagatgacctattaagtttactttcataacatttcaatatacttaaacaggtgcgatacacgcacggcttcatgcgacatcgatttaatcctgtgccggctgcgtagcagcataccatatcgctgactacgcgctgctatagctaactatgcgctgctatggcttacaatgtgcttatgtttaaccaagttcgcagaattaaaattatactatgtagtagggcaagcccagctatcgctgccactatgcactactcgcagtgctattatatgtttaagcggactctgctatcgctgctactatgcggtgggcccattttaattaatagcaggtgttccgaaaagtattatattaggccaagcgtcacggcgggggtgacgtaaccgcccccgttccgctcgcctcgtcggctcgctgcactactcaccgtgttattagtacatagttgtagccctgcggcccactagaacgcacgcggtgccgccttcgctgcagcaaatcggaattagtggggtggcgttttagccaatagaaattcacgtgatctacggacaacgacactcggattgattcttaggatacgtcggcaggtatgtcggcggctcatacccctacccctaacgttgatgattggataaaataccatctatcgcccttctcattcgataataatcggtcatcgccatttgattggaccatggccaccatacagtggctaagtataaaatcatatgtgtcggcaccgtcacgatatttatccttacggtacacatgctaacgttatctcagtattattatgcagttactcattattatgtagttactccacgcgcgacattcgcgcgacacacaattttgaatggagctcctggcccaaggcgcgcgtgcggtaactgccttcatcacttcagatttagccctctagcgcgcactccgctcttccaggctgagcccctttcattgtctcttgtatctgtacacgtaccccggtggtccacgtgaagattatcaaacaacaccatctttcgaccgagggctccaaccctgtggcgacaattcctctcaccagatctgatggaccccaccacctccaatgcattccttcatacgtataagtgtagctgagaagccgcagctcaaggcagatagagagagcgccatgtgtatgtgttgacgggcggcacccgccagatgcccccgaccagaacaccccacaccccactcacctctacatgcggtgtcgatcacgtggggaccgggtcgcttggtctcgcacttgcctctctggttatagctaccgggactgtgaatgcccatggccgacgccgccgcgccgctgccgaggcgtacgctgagccgcgagtctgcagccgtgctggcccgcaggacgagcgcgcgcgagaccgccagctccttcgcggacttcctctccgacggcagcagcgacgatgaagcggacgtggaggacgcggacgacgccgactcgcgcgcgctcctgcgcatgcagcagcaggccgacgacggcgcctacagcgacgcgcccttcaagctggcggagagcgcgagcagcttccggctcacgctgcagaacccgcgggacttgccggacgcgcaggacgccgggccccggaagctcgtggctccccagccggagcgtgagaccgcaggggtcgaggtcgcggccgcgtccgtggacgacgtcctggacctcgtgtccaaggtggagcatcacctgagcctgggcgccagcgctgaagcgaccatgaacgcccccgcccccgtctcccgggccagctcggccaagtcgctccggcgcaagacgagcgtgcgcgagtccgagagcgcgttcgccgacttcctctcggacggcagcaacagcagcgacgaggaggccgaggacgacgcgcacacgcgcgcgctgctgaggatgcagcagcaggcggacgaccgcgcgtacctcgacacgtcgctcaagatggaccggcctccggttgatctaccggacagcggcatgagcgagggcgagacaagcaaccgcagcttccgcctgacgctggccaagcccggcgtcttcgccacgcgcgaggacgacggactgctgagcggcccgaggaagctcgtggcggcacccatgacgcgcgagtccgtcgtgaccggctccgagtacaacaagagcgacgacgagagcgacggccgcccgagcatcaccgacgagaacagcttcgcagagcccgaggctgcagctgatgctgatgtggccatgcgcgctaacgacctccacgagagtctggcgtccaggccgccgagctttgacgaggaggactacggcgacagcttcttcgacgaaggcaggcccagcttctcggacgaaccgagcttctctggtggtggcgacagcagcttcacggcggcagacaacagcttcgtgtacagacccagtctgccagacgacgaagataaagcagctccgagtcaagcgccacctcccgttaacgcgacgagcaacaacagcttcgtagataccagcttcgtgtaccgaccgagtgtgccgaccaccgataacaaggctgtagagccccagacgcagccgacgagtacgagcagctttgtggacaacagcttcgtgtaccgaccgacgctgccggaacgcgagaaacccattgagactgcgaagagcagtatccccgcgaccgaagacaccagcttcgtgtacagaccgacgctgccggacaacgacaacggagacaagagcttcgtgtatcgaccgactctgccggatgacagcactcaggcagtgagtgcggagacagaagaccgaaggttcgtgtaccgaccaactctaacgctgccaggtgcaggtgaaggagaccgaactgtaggccacaatatcgctatgaacagcagcagagatgcgatagtggagaacgggggcaaggcgttgagtggccacggccttgactacgaggaggaggaggaagaccagccttcgttcttggggcagagcacctccaacttcatcaggtccagtgatgcagtcgacttcggctttggtggcatcgactcgtccttcaggctgcacgacgcagacgctgcgacaatcgctgcgaagtatgcaagcctcgacagcgaactgacagacattgcgatgcctccaaaggcacgcaataacgagtgtgaagttgtcgcgatgccgtcagtggtgaagtcaacccttctggccatggacaacacagtccccgcgtcgccaaaagcagcagccagtctcgcaagtgaaggcatcgtaaaagacctcgatcacgaccacgactcgaagcccagcgcctaccctagcatccccattcagccgtctttgtctcgacattccagtgtctcgtcgacggtgtcgggtcatgacgtctacatgcggcagcgtcggatgaccagcggcgggtcctggcgagtcgacttccgagagagcaagcacgccttcgacgaagagctcgcgccgttggccactcaggtgctgtcgcctcaagctgctgctctgaaacctgagcagccaagccatcgcctgagtacgttcgaggagcgctcctcggcggcgtcttcgtccttctcacaggccgatttcttcgtcgatgacgtccagcagaccttctcgaacgagagctcgctgtcgctggactcgcggtcttcgggcgacgactcgttcacgaacgtcgccatcctcggggagaacgtcggtgatcagaacgagcgacgcagcagcgacctcatcccgcagactagcaacgaaccccagtcaagagccaccaccaaggccccagacgcgttcgcccacagctacagcaagctcttggccgtcaacgtgggcgtggaccagagcttcagcgcgttggtggaccgcgacggactcaagcctgacggagactatggcagcgtgagtgcaagtgccgctgggacgagcttggggagttccttggcgtcgtcggcaatctcccggtcctcgactgcaagtgacgacctcccgttcgtctctttcagtgcggccagggccgtcttcgagggccaaatacctcccaaacaaaagaagcagcgcacgttggtcgcagcggcggcggcaacagcaaccagtcgagaggagccgaacctcagtaatgtgtcggcatccgaggctgcggtgcttcctcctcctcctgccagtgacgccaaagagccgaagccaaccagttccccctctgtggcgcctcgaacgctcggtgccaaaaaattttcgtcggccgcgcttctggccgctatcaagacgcgcgatacacgcgcagacactcgctcagaggagacggaggcgggcgacgtggcccccggtgcgttgcctcctctagctcctccgctcaagatcaaccttgggcctcgtggtcgaggctctctctcgtcctctctgttatcctcaaagagcggctctcagtcttcctcggtctcaggttcgcccttgaacatgtcgttcattgctcgttcctccgttgcctcgtcgaccagttctgcagatgatatcggcactgcagatcgactcgacttcacgggcgtgtaccgtggctcggtgaacagcctcgacgcctcgcggaagaatggcgttccttccaagtccgctcaggcccgagcggagctgaagcagttgaaccaaggacctcgtgacgaagacaagaaagcgacgagcaaggccgcgctcttggccgtgaagctggagcgatccaagagcgacagtcgcgcgatgcacctcgcagctcagcgcaaggtggaggacttcttccggcggacgggcgaggacgacatcgacgagcgcgaggtgcaccgcttgaccactcggaagactcgggcgcgcacgaccgtgatggagtgtagggatgatgccaaggcggccaagatcatcgacctcaagaatctgcggaatggcggcaagcggcctggctggcacctggagaatgatgcttcgacaacgcgccaacaagaggaagaggcttcaagacagggtactatggggatgacgagtagaacgacaagtacaggcacgacagcgacgcggtcgatcccgtccgagccgcacaactacgtgctgagtccggaggcagttggcaaccaggcacaactggaagaaaaggcaagggcgcgtgcaccgaaggctaaagcttctactggaaggcgcgcggacaacctgtcactgacgccgacactcgcgaggctctcggcgaacgagtcccccagtctctctgcgtcgccgttcgtgttttctcacgcgtatggagctgctggcaggtcgccagggaagtctccggtgggctatggagctgccagcggcttcctctggaagacgggaagcggatttaaaggtatggagcggtcggtcgctgaggattcgctggatgcttcccacgtgacgttctcccagcgaccgacactaactgagcgcgttcagagtttgtcggcttcgttggccagcacgctgcgccgcttcttaccgaataggaatgcccggcagtacagtggagagatcacctcgcctcagtcgcagtgtacagcacccgcagtgctgccgcgcgcgtatgacaacgacgggttctacgagacgccgttcaaggtgccaggcctgaataaaccgttgctgcggcgacggaagaagacggtggtggtggagagcaatggcgcctgggctcgccagtggctgattctagcggtctgtgcggtgttggggctgacgctgggcgcgatcctcgtgagcgtcgtggcgttcgactcgagcgtcttcaacttgtccgctgacgatgtacgcggactccgagacagcaacggggagctggtgctcgctgctgcggtgcgctggatgttattacctggacagttattcgtgcgcgtgtggagcgcggtgaccactccgttgttgatgtgctacatggtcacggccatggcggatctcgtgggctgcgccgataaaacgacgctggtgctgagcttccgctcgattgggtatgcactgctgctggcggtgatggctgctgctgaaggagtcgtggccatgtggatgacacacaagttcgggtggttccgaggcagcagcagcactgccatccctgaggcgttgacgctttctgccgctcttggtgtgactccactgcctcgaggagccgtcggactgctatgtgtcaatgatggcgagtatctgcagcgcgctggcggtggcgtgttcacgtgttcgaactcttcgttgacgttgccattgtacggagaggtcagcaccaactccacgggcgtcgccggcagtggtccagccgtgttcgcgctgcaagaagtgtccgacgtgtttgccacttcgcagtcagcaccatactacccggcatcaatgggttcagggggcaacatgaccacgtcactgttgtcggcgctgacgcccgacaacttggcgtcacacttcacgtatgtagcggatgatgagatggcgtccatgtgtggactggtcgtgttctccatgctactgggctacgtctgtgggaagcggatcctgcgactgcgacgcgatggtcaagccgcgatgttcgagtcggcgagaagagcagaggatccacaccaggctcgtcactacatcatgagcattgcgatggagctgcagttcgcgttggaaggactggtgcgcgtcatggaacggtacttggccccacttggcttcttctcgctgatgttagggaatgttgtgctgcatcatcgcgagtggcgcgcgctcacgtcccccatgacgtcgctgattatcggcgcgctgattgtgctcgtcctgcatggcgtgctcgtcctccccgtggtgcttcgactattctccagccgccaagttcctgcactaacgacggcgagggcgttcgtaccaaccttcctgttcgcgtttacgacgaacaacttgccgctgtctgcgccggtctcgatgcaatgctacgcgcgcgtgctgacggtgactcgctccgctgcgcagttggtcacaactgcggctgcgacgctcacacagaacgcgcgtgcattgtacctgccgatgctgctcctgtggctgctggagacatcgacgcctctggagattcacttgactgggtcagactatttctcggtggggctgatggcactgctcagcagcttctttggcggcagcactcgcgtgacgctggcgatgggacgtacgctgtgggctctcgctgtgagtaagcagatgcctagcgctgcgggcttgctgcctccgacgatgccgttgctagtcatctgtgacgtggtgctctcgagagcggccagcatggtgactgtggccgaccacctcgtgctcacgcacctggcagcgcagcattgggcggaaaccgtggtggatgggcccagtactagcagcagcgacgcaatcggcagcagtgatggcagataccacgaggagttcatccccccaagcccgagcgcgttagacgacagccaagcgcctcgcccttcgtccagtgccatgctgtcctctgttcatctgtagtagtgcgtgtccttgttctcgaagtccatttactaagtcaattcagtgatcatttgccagaggacggaattttgatcttagcgggcattgaagtcaaagcgttctgcactttgagccagttttcgccacttaaaactgcaaataccgtacgaatggaaactccaggagcgaccaaagtgatatccaccgctgtttcctcgagcccgacatcacgaaacgcgttgtggcctcctggcttcatatcgtatggctccactgacttgctgccccaaagctcctcaaaacctttgcgacttacttcgacgattttcgacacagccccaggagcgtccaggacgtcatgtgcttcttccacgtcgaagtgctcatggcggtagctctcctcacgatcacaacagctgcggattccactccagcgaagacctcaacgggggtagccctacgtgacgacagaactaacagcggaagaatactacgcactgtcgatcgcaactcggaagaacggggcatcgcctcgtcagtcgcgatgtgggccaaagtgaagtactgggcccacgccggcaagtcggacgagtatgtcaagcaaagggtcgggatggctggactaacggggaaagcgctggagtttgaccccaactacaagtacctggagaggttctggcacaggcttgaaggccgcacattggacaagtgggtgaggaacgggttacgccacacggagcctgggtgggcttgaggctcgatggcgtctcggagacgaattccgacgcgctgaggctctacaagcgctatgccaaacggtgggacgacaggaccttcgaccactacaacagcgtgttccagcctcgtgttgagtatggaggctccaaagcggaggttaacgcgaaagtggagatttgggctgcggctatgaggccaaggtgatacgttaaggacatgctgaacctgcacgggtctgaccaacaactcttagacaatccctactacacaaggtttctggagctgaggagatcgaacaaatgaagaaaacggctcgattacgacaaaaaatctcttcttgattcactttgatttcttcgagaagagagtaacgacttacgccgagattttcttgtgcttgtgagttcctcatggcgtgaagctcttattttattttatttttcgcggttaacgccgatggcactgagggtgagctcttggccttgaaaaatggggggggcatgccccccccattttgactgaagatccgcccctagctctgctttaaccccgcataccgtgtatctcagtcatccatagagtgaaggtagcttaactatttcgaagtattgaagagttaatatcgatagaggcctgggcatgcttggattacgaaagtaaaaaatacttggatggagactgcctcgctgcaccgaaaaaaaaatgatttctttgtcacttcaaattgttggcacgtgaaagcgcccaacaagggcgcattcggtatcgatgagcatagctaaccgacactagttcgaattagtggtccttgaaggtacatactttccagaaaaaaatgacccaagcttttagaaacttgcgccttaccaaataagtgaataagagttgagttcatctcgacttctttcttaaaaagtgaatgtagccactccagttgtcaagctggagtttgccgcctcagcacctcaactggaggggaaaacctgcagatggggacggcgttcaagaagagtcccaagtacgatcaaaaatacttgtgcaaggcgcaggggtggagctcaaaggctggttttgtcgcaacaatcaaagctagatgaaatgatgcccgctcggcgacgcgttccgggcctacgagtggtacgcgctcaagttcggcaacagcgtctcatgttcaagcgcccgatctccgttggcgaagacgacgctgagatgacggtgacgatctagctctaggtctagaaaaagacctctccaaacaccagcatcgtcattttatgcgtttgctctgccgtgtatacatgcactcactcaaatcaagtccggcgtggacgcgtcagcaaagcgcacgcctgcgaggattaccatcgattggactcgtgagcctggggcagattgcatcaccaagaaggctgctacgtgtaatgttacagtataaccagaccgctctacatgttctcggagcttcccaacgctcttcagatagtgagtgatctttagcgaatgagctgctgtgcgctcctatggattggggttgggcttttcactggttggagtaagcatacccctgcaagactgggttacaatctacatcgcgctgttcaatgggccaacgtttcgaaccgtcttggggcgaatgcacaggagcatcgctgttgcaatattgctcacgctagttgcttacggtctggagtcgatttaagccagagctactgtactttgttgaagtctacgtattttataaccttttttttttcggattactttcgagtaaatcaacacacattagcttctcgagtgctctatcactttatgaattagtctccccccctcttcctcactacagtacaccctgctgtaagaagttctcacgtcgtgctagtggcggtctccctcctactcagtctactcgatacttccgcagccatcgccacgttgacccagaccaagagctcatccttgcgtttgtccaacattgagcacgaggacaccaacggggaaagattgctgcgagccgtcagagctgctgatggcaatacgcttgtctccgagcgtattgccatcagcagctcctcgaaaggggcgtcttgtcgccggtcaaacctctcgcgtcgaacgtcaaaacttcggtgaaaagttcgctttgggccaacgccgggaagaccgacgaccaagtgagggagaagctcggactggtgggactcacgggccaagcgctcaaggagagcccccaagtacaaagcctatcaaaagtatttgtacaaggcggagggagcgaagcttgacgactggctgagctacaacactcagtcggaaagacgtgtggaagtatccaaaactaggcaaggcccccagctcaacgcgaaaattgtgacgcgctccgaatttacaaaaggtatgagctcaggttcgacaacaaagtgttccacaacatggacagtctgtggactattgcagctagttccctttaacaaaaattccgacgacgagtaagcggtgaatgattttttcaggtcttttcgataaagtacttccactatccaagtacaagcactgcgtagtgtttctcggtaacgtcagattctactgtagtatcagctcaaatgctaacggtaggtttccctgaacttggccgtgtaggtttcgagaagtttcgccctggtaaccttcgccactcctcctgcagttagaacctcggagacaaccggctgagcagcgccgtctccagatccgtggccatcttgtcgccgaagctatttctcaagacttggatcatcgacgcttgttcctttactggcttgttggcattgaatgcttgcaagtaggtggcccacgtgttcagtaccgggttggtgagaacggtatccacgtcgtccagaaagagcacgtccttaaagagcttctcaggcgtcatgtccttgtttttcagccagtacttgatctgttcggcctgcatcgtggtggcgattttctccgtgctcgggaccttcttcgccgcgatgagagtcgctgccagggcctcgtcacccattccaaccgacatcgccgagaccaccatagcgtctttctcgcgcatcccttcagtgacacgagccatgaacttggtaaagtaggcgaacagcggggcctcgaacaccttttcccctgcttcgtcaagctttaggccccggaaagcatcacttggcgaacccgttaacatccagcccctgaacagcttatcttccgtccactgggcgatcttttgcgtgcttgggttcttctctgcggccagaatcatcttgaccaaagcgtcctcgctgtagtaatagcgcatcgtcttgaagacaacggagagcttgtcgctgttcttgaacaagtcgtccgtgtacttgatccaagtgctgaagtatgggctcaccaatagcttgtcgtccaacttgtcaagcttgaacgccttgaacacatctgttggcgacttcttgatgcttagccagtactggagctgctcgctctgcagcctcgtggcgattgcttctgagcccggcgccttcttagcggccgccagcagaccaaccacacctttgtcgctgtagtgcgtcgtcatcgtcgcgatcaagctcaccttcttgtccgggttcgcctcgttaaaggcagccgcgtacttgccccaggcgttcaactgcaggctgtcgaacatgttctcggccgccttgtcgagcttcagcgccgtgaacacgtcatctggctccatcttcatccagcgctgcagctgcacggactcgagtctcttggcgtctctggatgtaccccggaccttcttggcggcttcgagcatgttgaccacgacgtcgtcgccgaaggtcttggccatggttgcgaccaacgtcgtctgctccgtagggttctgcttgttgaagacgttaaggtaggatttccacgtggtcaactccggattggagaggagtttgtccccagccttgttgagctcgtacagcttgaagacgtcgtccggagacttgccgatcgaggcccagtactggaactgctgcgtctggagcttggtggccatgtcctttgtctttgcgaccgtcttggccgcgtcgatcatcttgatcagcgcttcgtcgccgtactttacagtgagggatgtcatgagagacaacgccatgcgggaccgtctcgggtcctccacgaactggagccaagtgacgaagtgcgggttctcgaacaggttctcgccgggcttgattttggttaaaatgttgcgcacgtctccggacttgagcatcgctgcggctccatcgtcgccgtagtgcgccgccagtgtggcggccagagacgctcggttgttggggttcttctgcttctggttgaaggcgttcatgtactttgtccacgtaaccagcaacgggttgctaaacaacgtgtccccagccttgtcgagcttcaacagcgtaaaaacggcgtctgtggactcgcgattcgccagccaaagctgcaccagctccgtgtcgagcttctgcgcggtgggtgcagtctccggcactttcatcgccgcttggaggatcttggccaccttgtcgtcgccgtagctcttgaccagagtcgcgatcatcgtcgtctccttgtctgcgttcttactgttgaagaccttaaggtacttggtcaacgtggtgaactgcggagtagagaggaagtcgtccccggccttgctgagcttgaacagcgcgaacgcctcgtccggagttttccccttggtcgcccaagcgtagagttgctccagttccagcttggaggccaacttcttcacgtcggcattctccgataccttggctgcagcgatcatccgagcgagggcttcgtcgccgtactgagccgtgagcgtcgggatcatcgtcggcgccttggcgggcgcttttttgcccaagtcgtccacgtatctggcccaggaaaataactgcggagtctggaacagctttgcgcccgctaccttcttcaggcccatgcgcacgaagacctcgtcgacagacttccccttgttgagccacttggtgagtttcttagccgaggcggaaggcagcaacgccgctttcgccttctcgataatggagacggagactcccgctcgctcttcatcgtcgttaatcctccgaaatctggtggagtggacgtcggagttgagtgaaaccttcttcgagtcggtgacgaagtatgcttcggcgctggcgaggagtgcagcaaccgccagcagcacaacccagcggactcgagtcattgtccgccacgcactaaaaatgcgaaatgagcgtatctgcaggcagttataccaagtaagtacatggatagaacgccgcatggttgggggagagaaagagagaagcggctcttctctcttctgaagagctgcgccaaccgtacacaagttcagtacataccaatgttgattatcaggcatcaataaactaggatattgtgtctaatgcccatttggacttgaaatcggcactttggaaatcttgaattaggcaccatacaaagatctatatattagtatggcaagtgaagcatatgatttagagacaagtcgctatcaacagtgttgtgttcctggcaagagatatattcatggggccgagtgtgaatcgttctcacaccaggactaattcacgggtagtcccgacactgcgtcgatcaagaatttcagtctgtgtggtggtgatgccaggtccaccaagctagagaactgttgttacccataatatttgataaattccatgatgcgcaacagagcgcaggtacagtgtagctgctccttgctcgttctgtggtatccacaagccaatgtaatgtaccgaagatttgataataagtcgattgccaggttacatgtagttagtttattatttaaaatacttactttggtatattggtctgttacgattgcctggtcaatttggcaggtacggctgccgcggaatgcgctgtcatgtatgaaagcttcattggcgtgccaaatgcacagagcagagggaggtcgagctagcacgaattatattggcgcgaagcttgaaggcatagtgacgaaagtaacgggaggagggtgcaccataatcaatgattatggtgtcacctgtaataggcaccgcaccggatataattcagtagcagctactgtttagattctaaacccaatgctcagatgactttacctacaatatcgtgtaaagtacagtttattgactgacacctcgaaagcacatcagcttttgcatcattttcgtcttgttgttgttgctccttgtatccgtacgggatgcaatagaggatgttagcaacttcgtaaataacgactcaaatatacggtcaacatttttatgtgtttagttaaaacgaaatcgtcgacagtgttagcattctcgtatccgtccatttacgaaatccaactgactcctagcgatagaggccgctctgctgacacgagatccctgcatccgatgccatgctgcttcgcgctctgagcgccccgagtgactgatcatcccaggcgttcgaggctcaacgaacacagcgatgcgtactgcaagaggtacttccgcttcaccgaggatgcaatattcgcctcacccccagacaataaccgcctcacccgtaccactattttggtacactaattcaattggagctacgaatttctatctcgactagccgagcgccgccgctacgcggcggtaagtttaggttagtcgtagtagtgggggccacccacccccacttcgctccggtgggctgttttccagtcaaatgtcaatctccaattatagtatcgccagtatagacaaattaaagcccccgtaacctggacatcttacgttttcaatcaacaaattttgatctctccaatttccagccagcaatggctgtagcctccgtcaagagatttgaacacgaatgcgtatcgcgtgctcgttacacctatttacccactctgattggtttaaaatgcgtctgtcattggcctcctccttcactggccctcacaatttgactccctcaaccgcagctgacgatgacaagcaacctgtgcctccctgctactgctggacctgtattacagactccgtcccgtggtcgcctcgatggagaccaagttcgaagtgcctgcactgccttttgagcagcacatgaagacgcgaccggcgctgaaccatctcccggatctactgctggacggatttgctaagctactggacgcgaaatgcgtgagtcgctcgacgatccgtgtactgctagaggaggctggactatggcaggcgcagcagcgcattcagcaagaggcagcccaatcaagttcaaccagcatcgtttatcactggcaatcagatgggcgctttcatcggatgccgcagaattttgcttttccacagctagatgcgctaagtgtgtggcgtatttggtggcttggccaccctgctgccggatacccgccttttcgggcgctgcagccatctgacttcacgaagaccaaccgcaagatgttttcggaatggacggtgctggtccgacatatcgtcgctggtgtggaggcaagtacaggggcgagaatgcagcgaccaacttcacaacgtgtagccgacgatctctaccaactcggcatagctcatgtgccgatgaagccacctacacatgcggcgaagcaacggcccgagcgagcagtaaccacactgcgacgaatccggcaggcaatccacgagtcgaatccggaggcgaggcgtgtgctgtttcgtcacaggaagcgcactagaagcaccaaatagaggttaacagcattaacaaggcgttagtcgtgatgacgcagcacattagctcgttcgatagatgcttgttcgtcttacctcgccaccgttcccgtcgaagatgcacgacaatgggatctggcgccccgcagagtgagtactgccctttagtgatgagaatattagctaatcagacgacgttcgttatgcgtgtcacgacccggttacgggatctcgacacaagtcattaatttggattgtatgcacgtaataaggtgtttgtatgttgggagtactcttagtatggttaaaagtggctggtatcagcttcatcacgtcagtgttactataagtagatgcacttgcaagataatatattttctatcgcacggtactgtgttgtaaaccatgtccaaatcgtcgcaggtattcaaccccaactacaaagtatctgcatttagaacagctcgtgtttagtgttctctcataagtctgtatacgtgttattttaccaagtgtatcactctggcatggtttctgttaggtggtccaagagtatagcctttacattctgtatcaaggctataagcctaaataacaattcacgcttcgcaatacctctccttagcatatcgttagtgcttcgttcttattaaaacatcgtgaacatattcatatcgggatcgtttcggcatttatatgatccataaatgtattcaacttcgggctgcgataatgtggcctcatcaaaacttatttttatttaagtattagtctaagcggagtacataagcacattagcgcaccacctgcaccacagccgctaagacattgaaagtaacaactttgcatttcgtatctatgaagtacacgttgcactatgcaagttccgtttccagcgtttagcatacaggtagagcgcgtctatcatagaactccagctcattgaatgtcagcgtctactattcagatctcattatactacataccgacacataacataagctatcgatgcatgaaccacttttagcctttagcctgtatcccgatctccaatgctatacagagaacggaagggagttcaggttcagcatggcgcggtaggaataataaataccagcgtagtgtaagtaacctaaatacaccttattcacacacatatgaacccctttttagcaatagcagatacttcgaaggatgtttatcgcgttgagagccaagtacgcggtagttgtagttaatttgtccctgtagttttactatagtgaaataagctcggcttcttgttaatacttatccaccttcagctcacctggcgctacatgtactcgcactgctaccacttacaacgttgctgctatcacttactacgtgctcctatcactttctgcgtgctgctatcgctaactatacgtacatgccgctcactacgtgctgctagcgcttaactatgcgctcctatcgctgactacgtgctgctatggctaatgtggtatagcagtacacacaaaatcgtcagttgtggtaacttggctacaaacacaacaatagccgagctggtcggctttgttggcctgcgccgggttgcccccgagcggttcggcccaaccgggacagcgggtgtctcgcctttcgtctagacctgccaaccaagatcacccctccggagaaccgccgagttcgacggtctccgttcactcaaccctgtgccctccaccaaaggatggacgacggcgcacggagcgcttttacaggtcgccgagagcaaaggcttctcgactcagcaatcagtgcccgggacgtacgggagcacctgctcgcagcggtggcgagacttttccttcgcgcttggcgagtcacgcgcccaacccgggccgaccttaatctcttggcgctgccaaccgagtaccctacgagctatgcctctcgggtaccggcagcagacataatccggccccgtgcagggacttactggaagcgcgtgcacgtgttgtggacctagaaaattctgctctgttgtttgttatcactgtcgggcgccctgaaggggcgcctccactattcctaagctcctatacaaataccaaatgaaagtgggcggttttggatctcggccgactcttcgctgagctcggcgtcgcttgaactcggctggtccggataagctatccggataattcttcgaactcggctgagccggataaggtgtccggataagctggtgaactcggctgagctcgactaccgctacagtgtaccactccagccgagttggtcgcgcgaaatcttgtgtttcctacaccacaactgtcccggtcatgttccgagccgagttggtgagggacctgaccatcactccttgagtcgagtccaatctcggccaaaactccaacggcagcgaacaagtctccgcgccatgtcgtcgtccggcgctcctgccgctcctccggtacgttcttcgcctccgacggctccatccattctgctgctgacccttcttctactgatcttcacagacttcagttgcgtcgtctttgcagtcttcacatcctcccgcgcgagatgagggggagttcgctgagttggtcgactcggcgtcccgggctcgcggggtcagcgatgggcaggagcaccctgtcatcgatctgacaacttcccgtgggttcgaccgggagtccgagccggcatctcgcacttctcctcgcagctcaccgagtccgcgtggcgacaccacttcggacgccgccgaccttggtcagtcggactcggctgggccggtgagtctcgactctctcgctgcgctgatccatgcgcagtccgagcaacgccgcatcgagaacgcggacttggctcggctgttgtcgttcgtgatcactcgtcccgcgccggcggctgatagagaggtccgccgagctgccctcgaggcgacgtccgtcagcgaactcgtgagcctccttcgcggtcagcaccgaccttcaagtcaagctagtgacgtcgctgcactgagggtcgagctggagtctgctcggactattaacgctgacttgactcggctgctggattcacaggcggctgtgaaggccgacctcgaggaacggttgaagactgtcgaggaggagcgtgaccgatggaaagccgagtcgaagaagtcgtcccccctcctgaccagcttccagaaggcgatggccgagtctgaagcttccttgaagtcggcccgtaagtctcaggatgataaagtgaagtcagctctcgctcacgctaaggatctcggcaagcagctcagggaacgcgactcggagattgggcgtttgactcagcttctttcggctcgtgacgccgagtacgctgtgctccaggggatctcgaccaagcacttcgagcaactgcaggagtcggctcggctactcatttctggagacgcccagcctctccgtgatgccaaggctaccatcaaacaccagcgtgaggtcatcctccggcagaagcgtgtcatttctcgcatgggtcttttacccatgcacgatcctcacatggctgctgcagctgcagccgggttggacgcgcctgggttgagccctgctgacttgcagcgtaatgctcggttataccggattctggcccaacgtttcccggaggtgatggacattccggctggagagactcgtcaagtcgagttgaccatccacccgcgagcggacggcgccgctactactctgccagcgcccgtgagctcagctggttctttccttcgacaatcaactcggctgactgggtctgaggctccggcccctccaagcgagtctcccgcatcatctgccgccaatcctgtgtcggctggtgcggtttctacgcccgtgtccacttctgcttcgcgccgtcgccgcagcaagtcggtcgaccaggttcaccgagctcggctggatactctgacacccgccgaaaaactacttcgctactcaaacccgaagtcagcgacggcggctggttctcagcgcaagccctagaagccactcgagcagccgtacgcgtgtccacttcctggtgaagtcggccatgaggacgcgttggtccagcttgaaaaggctgcccaagagactgacgccgcatgcgacctatcgctccggtcgagcttgaacttagccgggttgactgtcgacgaagtgaatgcggaggccggcgacgaggtacactcgctggaagagggcctctcgttcgagttcaccgaagtgcctggttccgccgagcttccgagggggccctccggcccgcccgtgagtgtgccgcccgtgcaactcgtgccttactcttcctccccggtgcagacgccttcaagcggagtggctgttgtatcgttgcctggatctgctgaccttgctgcaactccgtccgctttgtcgcttcctgcctcggttccgttcccgactcgtgtccggtgggttcctccctcgaccagcgtgccgagcgcggctgtggtgacatcgactgccggcgccggaggacaaccgggttcctctgctcccgatccggcgcttgctacaacgcatgctgtgattgcgccgagctcaacggctggagtctcggctgcgggtacaatcaacagctccgctgcgattccgcctcgggtttcgcagtcttctccgggttggccgctcaccggctcttggcatgtactcgttcccggtttgccaatcaagcccagagtcgtcgtggcccgtcaggggtggcgtcgactgtagtcaccccaataccgagcactacgtcggtggcctcgacccggccagcgattcctccgagctcagctgggatgacttctccatcgggtcgccctttacgctccactgcggctactgcccgagtgttgagcgctcactgcttggatctgttagagactcctgactatctcgtcctccggtccgctcggcgtagctcctcctctggctcgtcgggctcggctcttggattaaatgctcctggaacctcagcacatccgctgtctgtgtccgagagttctgagtctgaggctgacgaccctggatctgctgacgagctcagttcggccgacgctgacgcatctcgccgggattcgttagcttctgcgctcccacctccgcacgggaagctccagagctacatggctgctcctcgttccgtccagcgagtcaggtggctcagactcgccgccgagttccatgaagcagagcggtaagggcaagcgcaagcggaggcgcaagcacaagcacaagcacaagcacaaacacaaacacaagtcgaagtccaagtccaagtcagcagggtcaaagaagtcgaagaggtctgcgtctccggactcggctaaggacccccgcccgtccaagcgtcagagaggttcgactggggactcggccggcggcccagccggggtttcagtcgcttccagctcaaccagcaactcggctggaagcgctggtatcccatcgagctcagatgtttcgccgtcgcctatttctgctggtccagcttcaaccctgtcggtgcctatcgtgaccgctcacggcgctggcgcccacgttctccctcagttgcctgcagctttacgctattcgctcgctcagctgcgcactcgagcacgccaggcggtcggccgagatgcccggatcactccccagctagctcagctgcgtgacatccgcttcgttcattacgggtctcggcggtgctgggaggctatcctcagccatcaaacagcccaagttactgtggatgacgcgtcgggaaagggcagcgtgccggttacgctctgttcccttactgggattaaagcgttcgcggacgtctaccatccggaccacccggctcagcggcttcttcgtttgcttcccaagactccaatcttcttctcccctcaagtcctcgacgatgccaagcgccgattggcgaactcggtgaagtcgatgaccttgatggagcgtctcgcagaagtgttcgtgaagatccgtgggggggggggggctccggactcggtttgtgacaaagagggtcccaccaagttcttcgtagcactgttagagcggtgtcactggatggtcgagtcgagcgtgctgatggggctccatccggcttttcacacagggctcccgtatcacgtgatagccgagatgtatgacacgtgggtgttgtacaagttggctcgcaagcgtcggggtgatgccctccgaagtctcatggctatcctgccggacgacctgttcactgcagtgatgaaacttctcggcgggcttgctgccccggaaatcgatgcggagctcttcttcgagccgtcggtcccgttgtatccgctggtcaatctcgcttagattcccgcgggcagagactggtgtgctgaagccgagtgcatagatgactctgatccttggagagcttggtggctgactgacccggcgacccatccgcacaacacgtgcttccggactcgcaacttggagttcatggttttcgctcctgctggggtcgacccgcgtatcgtcgaggatgctatcgaggaggacgtggatctcgacgagccagctccactccagatttcgtcgagtgctccagtcccagccaaccgagctgggtttcacatctttcaaggttgtgaagtcggcgaactcggctgggctgctggtgatgtggattcgatggctccgctgatcgggtcgcccaacctgtgcgacccttctccgacagcgtccctctttggtccggcgtcgcctaggtctccagctgagtcgagtgcaggatcgcgtgtccctctggctagtgactcggctattccgacctcaagctcagcggactcggctgcgcagaccgcagaagcagcgaatagctcgaccggctcggctacgagcactggaggttcgattggtcttttcgcagcggctgctgctaccgtcgtgtcttctgccgcgcattcacagggttcttcgtctccgtaacttgcggctcagccgccgagctcttcttcctttcccatccttcttcggcgtaattcatgtaatgtatgcaatttgacgcagtagcttccttcgcctcaactcagcctgctgtcttcacggagttggcgggttcatcattttggtgcaatagctttaatcctcgtctgcaactcgcaccatttgcagacggttttcacgcttcttctgccgtaagtagtcgaacaataatccaccacacgacaaattcgacagcggctcccaggttggctcatcatagccgacccacttgaccttgaacttccgctgagttctggaggtgctcgtagagagcggcaactcgtcgtccaggatggcttcgacttcgtattcgttcatcacttcatcaggctcccagctatcttcaggaaggagttcctcgtcaaagtcgagacgatccgactcggctaaatcggctactaccctagttgtcggtcgctcgccgagtcccgtgactgccttcagacgtgacacatgtaccacagggtagaaacggtatccgctcttgtccggatgttcgagctcgtaagcaaactcctccaccttcttcttcactcggaatggtccatgccatcgatgtgccaacttcttggtcaagccaggtctgactcgttccatgaacagccagacttggtcaccttccttgaatagcgacttcctcgactcggctatctcgtcacctacctcagtcgactcggctgctccctcgggtgagttcgctggggtgtccgtcccttcctctccggttggacagctctctgctcgactcggctgagtccgtcattgtgttccttcgctctccgttacttctccttcaactggaactcggccgcaagcttcaaagccacctctctctgtcggtttgcttccctgcgccattcggctgcccccgttgagtcagctgagttgcccctgccgagcctgactgactcggtcatcgccttgagtgtagaccgagcgtcccatccgtgtaccaggtagaccgtggtctcccgcctagtcgagtctctagaattgttgatggcatggacgagcttctcggctacatcatcccagtcggcttggagagggtcttccacgtacacacgcacagtctggatcatggtcttcactgagtgttcttgctgaccgttggcttgtggtcggtaactcagcgtcgctctcgacttggactgcatcatctccgagaacttctggaacacttcactcatgaaccggggctctctgtcgtggcgtaccagtgatggagctccaaacctccggaacacgttctcttcgaaggccttcgctacctcaagtgccccagtctcactcatcgtcttagcaatcacgaacccggtgaagtggtcttgaaacaacaggagtgcagtattgccccgccgagtcttcggcagtggtatgacaaagtccatcgataccacgtggaacggtcgctcgggcaccacgttgccgggtgaatagcccttcaggtgcggtttgctcttactggtactgcagtcttcgcacgcttggacatgtttgaccacgtctgcgtacaacccaatccagtagtagtcggctctgaccctgtggtatgtccgcacgatcccttggttgcctccctcgatgcagttgcggcagttctgcaggatcttgtctatcatggtcgtcggaaccaccactcgaagggataagcccagttcgccgagttcgccaggtggtctggccttgccttgtcggtacagtagcccgtcttcgctgaggacaaactcatcgacaactttcccagcgttgtgagctcggcgatgtgtgaactgcgcataatcccctctcaggtaggtcttcaggtcggcccatcgttgttcctcgtcctgggctcttgctattcgtaggcggcgctcagcttggaccactaccggatcgatgtccatggcgttgggctcccgggcttctccgagcttggctaccagctcagctgggttcgctggtggtgctgcgctaccgaactcggcttctcccgtcacccgctgtctagcgggcggaggtcggctatctcgttcaaagtgattacgttcagcctcctcattcgtagctgggttcgggactgagtgttttgctgcttcgtcttcgaaacggactcggcgaacttgactccttgtcatggcagccatcttaacaccctcagccgaggttgctgccgagtccgtgtccatgtgtggtgtggtaattccactaaaatcctcctctaccaaaaggtattagagacaccaacaacacgctaacccgcaaaggtaagcgcttattggatcaacacctgaagaccaggaacgatcccttacaccgggtcggttgcaagcgcctctgtgcaccttaggttgtcttcggtcaacccaaaaacctgtaccactagccacgagctaaggctaggatactatgtagcgctttcgggcaactccactgcagtccctcagaaaggaagggtaccggcgtgttaggccttatacagggggaccaaggcaaaacctcggtaggtagactaatacactcagggatactctaatcccacaaatatataccgaacgatactctaataccgttcctgcctctccggccacgccaactcttggcgctgccaaggaaactctcggtcaatgtacgataagctccccgacaggcatccacacgcagccgagcgtgtccaggcacaacaataagctagctacccttaccgaagtcggacttgacccttgttggctttgggggaagactgtctttttattactgagttgtctgaggccctgggggcctcgttctggtcatcctatgatgagtcctatgtccctatacaaatatctagtgtgaacgatcgcaataaggcgattccggacacatcaaatgacgaccgcggctacactaataagtgcggccgaagtacgtaactaaatgcatctgtacctaaaagtgggtaccatgaagcctcgatcggggttctattaggacccgacgaggcttcggccactgcctgtcactctaccgaggataatgtcatcatccaatcagaagcagccatctccgtctctcgcttgacctcgccttgatcgccccttgattgaacttgattgtcgggctggcgggtcaacagcgttggaaactgccactttccaataccacaactgcccccgcctcgtcacgagcctcccacgctggtgagcgtctaggcgtcctcagttcatcgactccatggctcctccgtcgcgtgcattcgccgacgcggctgccgctgctcttcgggctctccagtgctccggaccggtacgttcgtcgctcccgctgctcctcactgtcattcggatcctcgttgttgactccatctcattcttgatcatctcagggagctgttgatgtcgccaccgacacttcgggtcgtcgtccggcgcgccaggctcgttcggcgggtgcccccgcccctatcgccgctggtgctgtgcccccagccccggccgcgcctgcaggtgaccctacgctcattcctgccgcctccgggacctcggtcgaccctccaccggctcctccaagtagtcctgagtctgctgctggggcgaccgagactccctcgccggcagttcccagtgaagaggctcccgactcgccgccgacaccgccgccaagcgccagcgctccaccgtcgccaactcccgcgccttcggtcatgttggcaactcgcggggcgtcggtggggggcgaggcagctgtagggggtcgcgccggagctggtgctggcccggccgaggttcctccgacagcggtcgtcttgggcgagcaacagatgctggaactcgctcgtctcgtcgtgggtgttgtcccttcacctccagctcgagtcaacgctgctctcgaccacagcctgcaagctgctactaacgtcggtgaggtgctggctgctgccggtgctcctccgcgtctccctcttgcggaggctgatgaactggtggccctccgccgcgagaaggcaggcagagctctccaacgccaaagataaactcgctgaagagatgaacctgcggaccaagtcggactacttcctcgtctcggccaactccgagtgcgaccaagctctggacctcgaccaggacatgcgcgtccagctcagcaacgccagcgctctgttgatgcaagcgaacgcgaccatcgctcaccgctgacgtcactcagtcgttggagaagcagacgctcgttgctgaggccgattcggccgctgctgtacgtcggaacacccagctccacgagcgtataagtgcaagcctcgttacctacaacactcagttagagaggcttcggaagcagttggccgaccgcgaccgagcaaacgtcatccctgcacgcattcaagcgttgacggacgagaacaacagcttgcggcgagcgaattctatccttcgtcggcactcggcagcacacggactcgacgtcgacaccttggtcctggcctcagccggcatctccgccgcagagattgattggaatcttctcgggctatccccaccgacagtcactgtcgagagtccacgccatgacgaaccctcgtcagaggagggagaggagtccaagacgaccgacgtgccgatggctgagtccaccgaggctacgtccgctcccgctgcttcggtgggcgcttctgctggttccccggtctccaccgagtcgtcatcgcgcaagcggggtcggcaaaccgagtctgcttccgtcgggaatacggcatcccagcctcctcctcacaaacgcttcgacagaccgtcagtcgacctgagggccagggctgcagcggccgccgcaccatctagtcctcgttctgcatcaggagagatttccccgcctcctcggtcgatggtgcgtcctccaacgacggctcgctcaagctggttgaagtctcagcctctcccgtacgaacactcagacgtccccttgtatccgcggctggccagtcgcgcctcgcctccctcgccagccccagcccagcagcaggaatcgtctgacgtggagtttggagggggtatgagtcctagcgacacttcacaagatgaccttgagcccggcgagattccgggggtgtcggccagcgctcagggtgttcaaggttctgctaccgagccttccggtactgtcatcgaggttccatccgaggtttcgccttcggcggcgacttccgttccttcaccagtcccgtctggtacagccgtcgttggccgtgcccctcgagaatcggctgctggggtcaccgagggctctggcggcccgccagaccgttcacctagcggtgagtcgcctcatgagtccgagacttccgaggaccgcgcagcgttgttcctggcgatgttcggccccgacgaaagagaggaaacctcggtggcgcaacctgtcgctccatcggaggctccttctcctctggttgccgcgaccggggttcctgtagcttcacaagcggccaccgtgccactcccgagtcgactccacactcggtcggcctctgtttacgctcgggcgatggtaacagcaacggtgacagcttcacagtgggctggacctgcgtcgattgccccagcagtggttgacgcttccgacgtagctcctggattgcggaagctcagtggtcttgctaccctgttcttggagccgggtttcacggcacccggagcgtcggaatgctggcatctcatccaaaacgccagtgtccccctcgtcttcgaggacgacttggtcgcccccagttcagtggatggaatcgtggagtttggcttgtggacggatcctgctcaccccttccaagtgttgcgccagcttttcccagacgagctttatttgatcgatacgacgggttttccatcctcggtggctatatcccgtcgtgcaactggtcgggcccttctcgttcgcctatggcggcaggggtactcctaccactccaccgagaggggcgaccttggtttcgccttgtgggagcgtcgccactggattaggggtaaagctgtcaaggcgtatatcgacaacctcgtcagcaccctcggtcagcgcaacgtgcaagtcctagcgcttcgacaagcgtggtccaagtaccacggagagcgcagttatcgtgcagatcgcttgcgagaccagatgctccacaaggtgtggaatggggccattacgtacgacggacaacctccacagcgccgcaccgaggatttgctggagccgtcgtacctgcaatactcgttcgaggtgatggagtgggtccccactaccgacgactgggcctccgaggtggcggacgtggatgcccgcgagccgtggcgtaactgttggtttcaagcgccggcagaccacccctacaacacggctttcgccccttgcaacgacgtcccgttgtttgtccccaacggatcgactcgggaaaccgtggcgtcatcggtcgtggtcgaatcttctctgcggacttcgatggtggtcgctccatgggtggccgagttcgcaaacgctcgtcgttctcgctctccaagccccgatgaggagacgaaggagttgggtgaagcttcttctgccgccgggtcaagtctgggcgtgttggctcaggctgtgatggagatttagcctcattaggccccccgccagcttcacggtttcgttcacgttcttttccaatgtcgaccgaggtccgtggcgctttaggcgacgctgcatgtgctatcccaatccaaaataacgtcatgttgttcgttccatttcataatcttttctcgcgtcaacgcacatcgcattcaatactcggtcgcggttcccagagcttcttctctgccctcgaccgctgtggctgcctcaaacgaggcttggttcgtagctgcggcagccgggcttcgtcttgtctccctgcaagaagatcgggcttatgctcgttgaagaccggacttaattcgcgggagacctggcgtacttacgctagctccgttgcgtgtatgttttcgcatgacagcccaattttgacaactgtacacccggtctgctgcgggtatccggtgtcgacagcttgcatacccatttcatcatcaactccatactcaaccacgaagtcgagtgcacttgttcgtgctacttccatggcaatcactgcgtccgaagcctcggtcgccctcccatttgcttcatcatcacttgtttcgcctgttgagggtttgaccgaggcttgcttgcgtcttccgttgtccctggctccattccgatatctccattccatcgtgactcgttcgcttaacacgtaacatgcagattccagtaactttcttcgtctgtcactgcgagctggatagccctcgcaggcagttcaatcatcatctccagtagcctcgttcgtctgacatcgcgggctggattgcccccgcgagcagttcaatcctcgttggggcgcagaattactcctcgtcggccacttggaccatttgcaaacgtcggtcgcttcgcttccggcgtaggtaatcgtacaggaggccaccgcacgagagattggacgctggttcccatgtcggctcgtcatagccgacccccttcaccttgaactctcggagggcccggtgagttctcgttgacaacggtgtccggtcatcgaggatagcctcgacttcatactcgccgtccaggcggtccggctcaaaactgtcttcaggcagtaattcctcgtcgaagtcaagacgagtgtcttcggtgacctcacgagccaaacgaaccctcggtcggccttcgaactcgtccactgacttgagccgtgaaacatgcaccaccgggtagaaccggtatccacttcggtcgggtaattccaactcacacgcaaattcgtcgaccttcttcttcacgcggaacggtccgtgccaccgatgggctagtttcttggtcagtcctggtcggacctgctctatgtacagccacactcttctcccgggctgcaaagaaaacctcgttctcgtcactgcagctctactatggtcaggggaactcggtgcccggtcgaccgacgttctattctcgttgacgcctgccatgacttccttctccttcctgccaagcgacgcattgtgctcttcagctctccgagccttttccgcggcttggtactccttggccatcctcagggcgatttcctgctgtcggttgacctctcagcgccatgctagcgcgtcagtgtggctaccgaagcctcgtttgagtgacgagacattgccttgagtgtcgactgtgcatcccacccatgaacgaggtaaaacggagtttccttcctcgtcgtatcacggagctattgatggcgaagatcagtctttcggcgatctcgtcccaatcctgctgcagtgagtcttcagcgtatacgcggactgactgcatgatcgtcttcaccgatctctcctgctggccgttggcctgcgggcggtagctcagggtcgctctcgaccgagactgcatcatttccgcgaaggcttggaagacctcgctcataaatcgaggatctcggtcatgacggatcaaggacggtgctccaaaacgtcggtagacacactcctcgaaagcttgcgcaacgagtaaggcggtagtgtcagacatggctttgcccatcacgaatcccgtgaacgagcattggaatagcaggagagccgtgttgccacggcgactcttcggtagcggtatcacgaagtccatagagactagttggaagggtctctcggctaggatgttccctggcgagtacccgcggaactgaggtcggctcttacttgaactgcagtcagggcacgacttaacgtgtttctccacatcggcatactggccgatccagtaattgtctctcgccgctcgatgtagcgtacgggtaataacttgatgaccgccttcaagtgagtcatgacagctttgcaggacctcttggatcatcgttgtgggcaccccaagtctcatcttcaactcggcttgctcgccgtcacttgagcgacggctcgttcttgtgtaatatagcacatcgtcctcgctcaacacaaattggtccgccattttccatgcatctcgtgctgctctgtatccaatcttcgcatcaactccccgaagcactgccttcagattcgactaccgtaactcttcatcttgagcggaggcgattctccttcggtgttcttcctgtactaccagcgggtcaatgtcttctgcgttcggtgggcctggtgacgtgtcggcacgcagcggtgaagcttctgcttcattctgagactcgttcggcacaccattggcttctactcggtgagatgcgtctccctgatcggtgaccgagacttcatatgcaaaccggacgtgtttctcctttgctctcgtttgacgtctggtcatcacagctacgtgtccgggttcagtctcgttctgccgtctgcggtcggtttctcttcgcacaaaatcgaaaaaaagcttgctacgaggtttggcagaagctaccacggcccatactgtgttggccgagggtatgtcctcgacgacgcaaccgtcagcagcctcgtagatgacttcagcgatacggttcagcttcatcagctctaatactcggttgtccgacgataccatcgtagactccttgcactcgagagtcccgcttgccagagaatcggccgcagcgttaaactctctaaccacatgcaggtacttcaccgaccgaagcttggccgtgagttcttggtggtgctgagttgttgcagcaatgactccttccgacaggctatcacacctagggcttgctggatcgcgagcctcgagtcgccaacgacaactagatcgtcggctccatgctgtaatgcagcagcgacgccgttgttcatcccggtgtactcagcgaggttgaccgtggtgttctcgaggtaagcgctcgcagcaagcactactgtccactctggtagcttccatagtatccacgagcaactgccgtatccaccattcttctcggttttcgcagacccgttaaacgacataacgaagcctcggtaggaccgcggtaggcgtgcgtagagcagatgcgggtccaaacgagcagttggtgaccctcgtgtccggggtgtgacgaacgccagtgacttatccaagtcaacgaagatcgtcaagccggcttgaagtagctgagcaaacgaacagtcggtttctttgactcgttcgaccaacaggtgccacggcgacagcaagacggcgaactgggtagcccgaccgaataatgtcttggacttgcggacccagtcgagtgtcgaaaaccgagtgtagacccggattcgctgtccaacgagttgagtataacacaccttcagtatcagcagaagcgcgaggacctcgttctcggccgggtgataattcatctcagcatccttcaaaacacgtccgcagaagcgaacggggtgtagtttgccctcgtgctcttgcatcaacgtggaacttagagcccactcgttggcgaacaacatgacatgcactttcttcttctggtcgaagtgtcgtagtatcggtgctgtcgaaaccttctgttggagcatcgcgaagctgtgcttggccgcggtgaggtcacccccgggctggaagtcctcgtccttaagctggtacagcgctgctccatagaccgcgaagtcttggatgaagcgactgttatagttgagtccatggaaggactgcattcctttcctcgatgacgggaacggaagctcggccaccccagccagcttcttagcgtccggtcggataccttctgccgagacttcgtgggacaggaagtctaccttggactgcacaaagatgctcttcgagaagctgatactaatacggcactcttcaaaccgtaccagcaatcactctagcgtcgccaagcacgactcgaaagtctcggcaccgaaacagatatcatccacaaatgaccggcgactgaatactggtgtcaacgaggagtcatcgggctccccgttggcgaacatgtcggcgatagggctgttgaccagttctgctatagctcccttaccaagcgagttgtctcggtcggcctcgaacttggtccggaatggctttgccgtgctagtcgaagcctcgttcaccccagcatgagcttccttgtcatgttcttcagctagacgcatgcgctccgagaatttaaaccatcctcccgtcggttggacgaagccccaaagcgcgttgtcaatcatgcgttgatagatcatcggtgcgttcttcaggccgaaaggcatacgcaaccattcgaagtgccccagtgcgcagacgaaagcagagatcttccgagctcgttcggtcatcataatcgcccagaagccgctagcggcgtcaagcgagcaaaaccacaagtacgcctccatgtccgtcagcaactcattcaccaggggcatggcatactccataatctcggtgatcgcattaacgagtttgtagtcgatacacaggcggatatccaccccattcttcttcacgacgatgacgattggcgacgcccatgggctgtccgagaaggagataagcccgaccttcagcaaacccttcagcaattcgtacagcttaccgaggaagcgaagcggggtccgccgagccttctgcttgattggcgcgtgcccctgcacattgatgtcacacacgaccccgtaggctggaggcgggagggcgttaccgctcgcaatcatgatcttctcgtggctcttcagcacatcgaccagggccgtctgctgcttcacgctgagttcatcactctggacgttttgccccgagtagtccagcgtcgtctccgacgcttcggttaggtccgacaagaacgccagctcttgtgcgtagtcggtaggctcaatctcgttcgagacgtgctccgaaacggcgttcacggtgtcatcaccttcgccagacccttctgcaacgatggcatgcatgaccgagatataggtcgcctccagtagctgctcggggttgtcgatcgcacttagatccgaatcatggaattcagtgtcggcgtcagcggtggaggttccggcttcagtaggaacgtcgttaggccctgggtcgtgttcaccccagtcgacttcgctactacacaccgcagccgacgtttcgtctggctccaggctggacgcagcggtccctgttggcaggacatcacatggagttgtctcggccactgctaccacgtcgcggtcatcctccgaaccatcgttcgtcacgctgtcaccatcactcagctcatcactcagctcatcactggcttccgatgcctcaaccgaggcgtatgtcgctccctggccggtggagtcagcaccactgttcggattcacgggcaggcaacccgctcggcttggcggcgagtctccgggtacgtccgagtcatacgacgcgctggcctcgtcgtccgaaccatcgttcgacccaccagcacgatccacatcggttgtatcaactcgagcgacatcgaccgagccttcactgaccctggggtcgtcgtcgtagccatgtacatcaggtgacgagtactcatcatccaacggagcttgttgacggccttctggccatggcggcgcatccggtggcctcggcaggatctttcgcggcgtcgggtaagttgggcgctcaaccgcagccggctgttcagccaaccattgctcgtagagacgacgttctcgtccttgcagagtctcaacacgactcgttgaataggccaacacctgccactctttgtacttgatagagtccaacctcgcgtagccggtctctcgcggtagttcaccatgcggtacccacagcaccatggagtcatacttggcgcactatgccgctgtggtcgtaatattggtgagccgtatccacgtcgcctgcccccgtcgaaacctcgttacggtcggcacgagcttgcccgcgcgtcgtacccacacatcgtactccgaacgaggtagccgctggcgcggcagtcgaaactctcgccactcgcgaccgggtacgtataaatcctcgatcggcccacacgaaggttgcgtgccgtaaggttcgccatcttcagcactctgcgactttagctgtggtaccatgacctcgtccggaaggcgtgcggtgccatgaaatagatccagccggattccagccgggatcatgaagtccatcccaaggaccacatccaccccggcactgtgatccattatccacatttcaaattcgtagacctgctcccacccgagggtggtcttgacgagcgcccgtcgccgggtctccatcacccctgggttgatgccgcggacttcgagacttcgtccgtggtcccggaattctcgcatacgtagccgcttggcgaagctggcagaaatcacgctaacattcgctccagtgtcaaggagtatcctcgttcgcgcgtcgtccactgcgccattgaccaaagccctcattcacttcctcttgtcgtatcgttgggacgaccaccaccccagtctctcaccgggcagtaatttcaccgcccgaccgaggttccgaggtggcccccttatctgggctagacttgtgatcaaagcctcggtcgggtgtccatcacgttcatcatcatcatcttcatcaataccaatcgcaacgagacttgcgtcccggttctctccattttccgtcggtttcacacgttcattgttcttcaggtcgtcaggccgtttgctttcgcccgtgaacgcgaacagatagtccgcatcaacagcaggctcagctaactgtggcagcccgattgggaccaccccagtttcaattggcggcctgcctagtttaaatggcttccatacaccaggctttgcagctctggcgacagatccttcttgtcgaccctggacttcaggagcttggtgagctcatggagtgcttcacacttcccagcgtcgtgcacctgtttgcacagtttgcaccgccggtagcagaagtgcaccgagtgggacgggcttccgcacgcggcacacggtccatactggcgtcaaccatctcgttcacggttggacgggcctcctccgttcctgaagcctcggttatcagaccgagcgaacgttcctttggctgcggccctgccctcagcatcgttagcagcagcgacttgtccggtagacccatccgagtcgtaatcagcgtctgaatcctcgttcgagcgttggtcggccgagtattggcgctcatcctcgaagtaatcctcgttcgcctcagcatcacgtcggggggcgtatggagcctcgttgcgtgcaccgaccgagcctccgacgttccattccgccatcacatcggccagcgcgtcaaccaaagtgactcgggactggtacggcgatccatcgcgtcggtcacggcgacggtcgtcttcactgcggtcgttgcggcggtcgttgtcacggcgacgtcgttcgcgacggtcttcgtcgtggtagcgtcgttcgcggcggtagccaccacgagaatcctcgttcgacctcgcatcgcatcgacgtccatcatcttgactccgagagcggcggaacgacgattctcggttcgatttgcggtcacggtgacgcaggatgtcgttgatcatgtcttcgaggtcatggatgctcttgacccggacgtggcacagacggtattctaagtttcggtcgtcacacgtgaccaagacgtggtccacgtggtccttcgcgtcacgaccaccgttttcaaattgcacaccggcgttgcgagcgtagccgttgagccggttgaggtagtcacaaacgtgttccttgtcttcccgcttggccgagtagtaccgagccttcgcagactgggaaaacttcgagcaatagtacttgatgaacgcctcgctcagcaacttccacgtgcgtcttgtcttgcgtgggagctggcgacaccagtgcagggctcaatccctgagcttaagttcgaacgccatacaccactcgttgggtggtgcatgcgttcccttcatctcatagatgaacgttcggagccatgctcgctcttgtcgcgcgttccgtagaacggcttgatgttggcgagaggcaaatcgtggcgatctcgagctttggggttgagctctggttgtcggtcgcgcttagctcgcgcacctgacgtgtccattcgctcggtaggtccccttcgtagtagtcgggtccgaggtcgtcgtcgctgtccgacgaatcatcttggaggtcgtaacgtcggccggaccgacgaccggtcgctccgcgcgtgccaggcgtggcgaatgaagcctcgttctccctagccagacgttcactacgatccgtagatcgtggagttaccatgtgcgagtcttgcatgtacggcgaggcttcgcccttggttgcaaagacaccgtcatcatcccttccgaggggtcgctggtagcgggaccgtcgacaggtctactgcctccgaggtcgaacgaagcatcgttgggcctcgcgaactgacgtcctccactccaaaggcattacgcagcttcttcctccacttggttaacgccgtggcagcggcggtcggcgtccaactcgcgagcgcagcctccgtggggtggatctggggttcgcaccccacagctcgcaggaggtccacagtattctgcgcaatgtgccgagtgctcgttgagttgatcggcgtagccaacacccctccgaggtccatccagatggcctggcggacttgcttcggggagaacaactgcatccattcgctcttggtcttcatcaggtctaggcaccggcctaagatcttgttggccgccggagtatccccgttgaggggaggacgagtgccaaccggcttggaggttgccctcctaccgtcaccgagggtttgaagacctcgaaggcgccgtcatccgcgtcgtaggcggactcgaggcccggcatgtccttgaacgtgtcggagaggtcgcgggtaatcgaccttgatcctccactgcgacctgcggacacaaccgcagcttccgaagtctcggacatcgctgtccggacatcccagtcatcatcgtcgtcatcttctttggcgtccgaggaatcaatcaccgtgtcgtagctcaccgaacgctcgtcaatcgactccatcggatccgtcgttggggtcgagaatgagcttccggagcgcaccgaagtctcgttgcgcgttccactcgacttggccggcgttgctggtaccgctgacttgactcccttcgccatcttctctcttcttcttcttcttcttcgcttctcttcttcttctcttcttctcttcttctcttcttctcttcttctcttcttcttctcctctttgctcgttggggtaagacctacaacaatccagacacacagaaggtcgcaccaatcccgggtcgcggcaccagttgcggtgtggtaattccaataaaatcctcctctaccaaaggtattagagacaccaacaacacgctaacccgcaaaggtaagcgcttattggatcaacacctgaagaccaggaacgatcccttacaccgggtcggttgcaagcgcctctgtgcaccttaggttgtcttcggtcaacccaaaaacctgtaccactagccacgagctaaggctaggatactatgtagcgctttcgggcaactccactgcagtccctcagaaaggaagggtaccggcgtgttaggccttatacagggggaccaaggcaaaacctcggtaggtagactaatacactcagggatactctaatcccacaaatatataccgaacgatactctaataccgttcctgcctctccggccacgccaactcttggcgctgccaaggaaactctcggtcaatgtacgataagctccccgacaggcatccacacgcagccgagcgtgtccaggcacaacaataagctagctacacttaccgaagtcggacttgacccttgttggctttgggggaagactgtctttttattactgagttgtctgaggccctgggggcctcgttctggtcatcctatgatgagtcctatgtccctatacaaatatctagtgtgaacgatcgcaataaggcgattccggacacatcaaatgacgaccgcggctacactaataagtgcggccgaagtacgtaactaaatgcatctgtacctaaaagtgggtaccatgaagcctcgttcggggttctattaggacccgacgaggcttcggccactgcctgtcactctaccgaggataatgtcatcatccaatcagaagcagccatctccgtctctcgcttgacctcgccttgatcgccccttgattgaacttgattgtcgggctggcgggtcaacagcgttggaaactgccactttccaataccacacatgtacaggaccttagagatcctgtttagggtcttcaactcggctttccgtccggcgcttagcacgacctttcctgctttggtttccagtgcttcggtcgctaaagagtcagccgccgagttgtagagacgcactacatggaggtagcgaactgaattcagcttgctgaccaatttcttgtggcgtgccaactcgacttacaatgtctccttacacgcgatcacccccattgattgctggatcgcaaaccgagaatcgcccacgatgatcaaatccgtcaccccgcgctcaatggccgaggtcaccccattgttcatgccggtgtactcggctatattcaccgtggtcgatgggaggtgcgcgctcgcagcgatctcaatgctccagtctggcaaacgccataggatccaagaacaactcccaaacccgccgtgtttagcggtcttcgccgacccgtcaaacgacaggacgtgccccttgaagtctcggggcacatgcgcatacagcaactctgggtccatgcggaccgcagccgagttcttggacggtggagcgacatgcgttagcagctcgtccaaccccgctgctggcgtgatggacgcttgcagcaactgggcgaaatccgtgtctcgttcacggacccgcttgaccttgaggtggaacggtgatagcagcaaagctgaccgctctgccgtaaagcgacttcgactggaacacccattcgagagtcgagtagcgggtgtaaacatggatggtcttcccggcgagcaacgtgtggcacaccttgatgagctgtagcaaggcgagaacttctttctcggcgggatggtagccgagttcattatccttgagaactcggccacagaaccgcactggatggagcttcccgtcgtggagctgcatcagcgtgctactcagagcccactcattggcgaatagcataacgtggacgtctctagccgagttgaagtggcggagtatgggtgcgtcgactaccttctgttttaactcggcgaacgccgcttttgcggccgtcagattaccgccgggtccaaagtcgtcgtccttcagctgatagaggaccgccccatatacagccaggttctggatgaaccggccgtagtagttcagcgctcctaagaatgcttgcatctccttcttcgtcgtcgagaacggcggcccggctatcaccagcatctttttctggtcggtttggattccagccgaggtgaccccatgtgacaggaagtcgactttaggctggacgaagatgcttttcgagaagctgacgctgatgcggcattcagtaaagcgttgcagcaatcggtcaagcgtccccaagcaatcgtcgaatatccccccaccgaagcagatatcgtccacaaacgatcttcggtcgaaaaccggtggaaggcacgattcatcaggttcacccgtcctgaacatgtcggcttctgggctgttaatgaattcttccaacgggtcaaactcagcttgagctcggcggtcggcttcaaacttggtttggccactggcttcaaagtcgatgtcggctgcgagtcgtttccgctgagcttctgaggcggcttccgcttgtaggatgcgcttggcgaacaccttccagccgccctagggttgtacgtaaccccacagagcgttatcaataaggcgttggtagatcatcggtgcattctttaatccgaagggcactcgcagccactcgaagtgaccaagcgcacatacaaaagccgagatccagcgcacccgtcgagtcatcatgaccgcccagaaaccgctagcagcatccaaagagcagaaccataggtacgcttccaactccgtgaggagatcgtccactagcggcattgcgtactccatgagcaacgcaatcgcgtttaccaacttgtagtcgatacacaaccgaatgtcgaccccattcttctttagaacaatcacgatgggcgatgcccatgggctgttcgagaaggcgattagccgagctcgtaacagcgccttgagcagctcgtacaacttgccgagatgcttcagcggaactcggcgggcccgttggcggattggcggatgtccctatacgtcgatgtcgcacactacgccatatgctggtgcaggtagggcattaccactggaggtcatgatcttttcatggctcttcaacacctccaccagccgagtagactgtggccaagtgtgcgccgagctccgaacgtttggtgcttcatagtcgagttgcgtcgacactgcttcagtcaaatcgggcaggaacgccaactcgcgagcatagtcttcgagctccaagttcgttgcttggtgctggaactcggctgagtcgcctgccgagccgcctcggccatatgtctcttcctcgtacttggctgccagaaggtaacgtaagcgcaggtcttcctccgggtccgacgacatgggctcgtcgctcacatcaatctcatctcgagcctcggactcggcggcttgggcccggggtcatcgatgatcgtccagtcagacaaatcgctcgattgctcacttccacactcatctgctgcactgggcgcttcttgaccagccgtcactgtgatctctgctcaactaggcgggtcattgaccaagtcagtagtaggctccgcgctcaatgttacttcctcaggcgctagggtagcgatagccgggttcgctggttctgtcagagtcaagggtggactatcgactgcttctgcctcggctcgctcctccgactcggccaacctctcccattgctgggcgcaagtcagtgtcgaatcccgcttcttggtagacggccacgtagtcacccctttcggttcagggtattctacggtccacagctgacggctgtcgagccagccactcggcgtacagccgttgttccttttgcagtagatccttgtccatagccgcttcgtaggccatgacttgccaatctttgtacttcgccgagagcagcctgacataaccatcgggcggtaacaccccatgcggcgcccaggcaccgactgggaaatgtgttgggcatcacgtccaagtcggcttaaggttggtcaggcgaactcgagccactcggttacgccggtcgaataccacggtcggtagccagtctttagtccggcgtacccagaagtcatgtgtttcatcactcggttgattcctcatcagcctgaactcggtgggaactcggctctcgagattcaccggttcggtcgggccgtctgtgatgtagaggctgcctttcggttcatccaccgagttatgggaaggacaacttcatctggtaacttcgccaccgagttgtacagatccaggcggatcccagccggaatcatgaagtccgtaccgagaatcagcttgactcccgcgtggtgatcgaggatccatacttcaaattcatacgtgacctcccagccgagtgtcaccttcaccatcgctcgtgacatcgtcgccactttgcctttcccaataccttgaacgccaatctgttgatcctggcgtgtgaaccgcttgaaccgcagcctcttcgcgaatccttcgcttactgccgacacattcgcgccggtgtcaagcaatatcttcgtacgctggtcgttcaccgctcccattatgagagctctcatccgaactcggcggtcaaacttttgtgacgaccacaagctgagtcgctccccagggggcagcttcataactctggtggctgtggtcacatccgtcgatcgctgagtcgcaactgcactgcacaatcttgctcggctttcttctccactctcgccgagctcaccatcgagcccatcgctttcacaatccaatacgtcgtcttctcctcggtcctcgggccttcctgcctcaccacaaaggcaaacacaaagttcgcctctactcctggctcagctgactgtggcagcccggtatcagccaacccagtcagtgttgacgggccgccgattttaaatcactcggcgtgtagaggtcctggaggtcttcaggtaacttggacttgtcgacattggacttgacaaatgcggcgagcttctcatagcgctggaacagctcgcattgaccgacatcgtgcaattgcttgcagaacttgcagcgacggcggcagtagtgaacggaggggttcgcaccaccgcaggcagaacaaggtccatacgaagggcgttcacgggagtcactgcgccgcccagtccggtcacgccgatcgtatcctcgagtggcgcggtcagccgagctcggctgaccccttcggtgatcactccttggtgtcccagctgagttccctcggtcccccgaactacggtcgcggtcgctggtgagcccggtgtcgatgtaatcgtcttccgagtctacagccgagtcggagtagctcggctggctgccgtcgctctgatcgctgtccgagtcgtagaggttggattgccgattggattgacgtctctcagccaacacatacgggtcgtcctccagcagcgctgtcgctagtcggcggtctcgaccatcgtcgcgtcggcttcgtcggtcatctcggcggtcatctctacgtcgttcccggcggtcgtttcggcggtcatctcggcgcggctcactccgctgagctcccgagtgccttgacgaatcggtgcgcttggcgtctcggctgcggcttccgatgagacggtcgcgctgtttcttccggcgctcccccatgatcttctagttgatgatcttctcgaccttcttgatgtcggtgagctgttgcggatagagcagatccatgacgtcatcatctctgcaatgcaacaggaagtgttccacatggtcagcagcatccgctccaccggcttcgtactggattttcgccgacttcgcatatccgttgagacgaacgaggaagtcacacaccagctcgttgtctttgcgctgagccgagtaatagcgagctcgtgccgactggtcaaactccgaacagtagtagtcggcgaatgcctcactcagcagactccacttccgttgcgtcttcttcggaagttggcgataccagctcttcgcacctcgctccagcttcagcgagaatggctcgtaccagaggtcttgtgccagccgagttcctttcatctcgtagatgaaccgcttaagccactggagagagtcatccggtcggtaacgtttgccttcgaacatagggatcttgtcgagggacgcatgggtgcgaacctccaagtattgcgtccgatcactttcagcgtcatcgaagctaaggtgcttgatgacgtccttcaccgactcttcagccaagtccaggtactcgcgcccatcctcgctgtcgctgagctcggctgcgtctgcagcgtcaaacaactcagcgtagcgtccacttggctgcttgccacgcgttggcatcttcatatgcgaatcttcgaaatactgcgtaccctcagtagagcggaacatctcggctctattgcgttcgggagtcttcggcaggggaatcctgctggggtcttcgacggtcttcggagtatcagccactcgtttcgcaatagtctgccgagttccgacggccccccgctcgagaccaaacgagactctcaaccgacgcttccacttgaggatttcgcgtgaagctcggctggggtcccaatcgccgagtagcaggctgttgggtcggctcgtgcaccggaaccccatcgccttgagtagcagcaccctgtcttcgaccagttggttgatgtcggtgctgttcaccggctgagtcagctcgggaactagcaccagccatctcgcctgagccatcgccactggggcaaacatcatcatccactcgctctgagctcgcatctcctctccgagcctgcccagaaccttgttcgcacttggcgtatccgcattcctcgtcgctcgcgggatcaggggcggacgttccccttgagcggcggcttgatcttcgtcgtccgtatcattgccgagctcggcggccaggttgcgcacaactggacgtggggtacccaagcgacaactcgtcgacttcgtcgagtagctcggctttctcctcatactcatcctcaacatcttcctcactttcttggtcttgggcatcctcctcatcgaactggacggtgctcgcctcgtccgccgtcgcgtccgtgatcatcgcattcgccgagtccgccgagttggtcagtccagccgagttacttccaaccgtcgctggactcggcgtaacaattcccttgaccatcttcacactctcttctcttctcctcaaaccttggttagctggtacctacgaaacacaagcacacccctgttcccgggtcgcgacaccagttgtggtatagcagtacacacaaaatcgtcagttgtggtaacttggctacaaacacaacaatagccgagctggtcggctttgttggcctgcgccgggttgcccccgagcggttcggcccaaccgggacagcgggtgtctcgcctctcgccgagacctgccaaccaagatcacccctccggagaaccgccgagttcgacggtctccgttcactcaaccctgtgccctccaccaaaggatggacgacggcgcacggagcgcttttacaggtcgccgagagcaaaggcttctcgactcagcaatcagtgcccgggacgtacgggagcacctgctcgcagcggtggcgagacttttccttcgcgcttggcgagtcacgcgcccaacccgggccgaccttaatctcttggcgctgccagccgagtaccctacaagctatgcctctcgggtaccggcagcagacataatccggccccgtgcagggacttactggaagcgcgtgcacgtgttgtggacctagaaaattctgctctgttgtttgttatcactgtcgggcgccctgaaggggcgcctccactattcctaagctcctatacaaataccaaatgaaagtgggcggttttgagctcggctggtccggataagctatccggataattcttcgaactcggctgagcccgataaggtgtccggataagctggtgaactcggctgagctcgactaccgctacagtgtaccactccagccgagttgctcgcgcgaaatctggtgtttcctacaccacacttgggagcaacgtactgtagtattttttgaaaagacaacaatacttggtgcgatgaaatcggtttatgcgttactgtacaagagggatacctttggctcactaatgagcttccggatggtatcgccacatgcagcgaagtaatactttaaagcatgtgtttcttgcatgacctaacatgacctgacctgtcaatgacctgtttcgcgctcttccgatgcgcgtcgtatacacccaacgttttgtcattttaattggccatattcaaagcaaggccaaggctgggccccagccccagccgctaggggtcatgccttcatcatgaatggcgcccacggcttcaccagggcgtcgccatcgcgctcctctaagtgcaccgtgccggagacgcgctggtcactgccccaaagacactctaatccgatagtagcaacgggacatgcgccctcttgccggaagaaaggtgctgcaccaccagtagcagcgctgaatggcctatggccgctccagtagttcagcgatagagtggagtgtgctcgatgccaggtcggctctctactctaaactcgttttgggaggaccaatcacagtgacagatttttggagttggggggctaccgataccattgcccttaacctgccccggaatgatcatcccctattgaaaccatgtccggtaaaaagttaggattatggttttgtccgactaagtacgatagccctaacctgacatcggtaaaaactgaacgcaagttactctctgatatttgtcctagaatcaaggacaaaacagaaacgcgatatgttattaatgacactttgtttatagtcttttaggcatgatggacgatggtggacagtttgcgagagacacacacttgaaagtggtaatctagggctttcttccataggaattagatagtgtatctcatagaactccggtcaaggttagcttcaagtttttggtcacttattttgtccttgatttggaggctgtgggggggtaaggaattgctccgaaacctctctgatgaatgcaagtgcggggagtaccggtggaggtttcaagtccaaggtaggccaccctgaggcgctgctccatgactttccttcaaatgcggcatagtattaatacatgtatagacggtctatcctgaagtgcacacctcaatcccagttctattcaccatcatcgagtgccacttcgagttttacgcgccagcccttattatccagctcgctcagccatgcgtttcgaccgcctactacgtttattcgccacgacattcgttcttctcgttgccagagctgcccacacaccagaggccaggacgagtgaaacaggaatcttcgctgcgaacccgcccctcgtcagcggtggtcgacttttgcgggttagtagcgcggcaaacgacgcaactcccagcacggagaagagaggcatcctttcgtccatcaaaatgtgggtgaagacccagtattggtctctaatcgagaaatccgacgactacgtcaaagccaagttgggcctagcaggaattgaagactcagtgatgaaggcaaaacccaactacaagtacttgcagaggtttcggtacaaggtcgaaggatgcatgctagacaaatggctgtatgacaaaggatactcgacacagacgattacaacttggagggcaaatcaactcgcgaccaatggctatgccaaaaagtacgataacgccatctaccgggtactaccacaagaacagcattttcgagccaccgatccactttgacggttcgccgggggagctcaacgtgaaggtgcggatgtgggcggaaaagggaagacccaggtggtacgtcaaggagatgcttgggcttgacgaggtaccaaaaagcgcgctaatggccgatccgcactacaagaaattcttggagctaaaagatgagaagtaagaaaagcgcaatgcaatacaacataactctctaaaaccgtattttatacgcgagaaaataacatcagctactcggtgaaaaaactttcgcaccaaaagacgagcgggaaggcaatagcagtgccggacatggcacccaactgagtagccaaaccgttccattggtacacacgccgagcaaaacttgtcgagtgcttgagatctggaccaaaacaattgagcaattttagttattaataggtagcaagatgcaaaaacagccatattcaacctacctccagcgcgttttagcgtgagatacagcattgtctgagtgtaggcacatcctatcaggtagaggatgtgaataaggagagctacaccattacaaagacagcagacctttggtaagcaaaacaccacggccgtcagacccaacgcatggtaacggatggctcacgaagtaaatatccgtgcttttcgttgctgagtactggcgccgacgtcagcgagaacgacagcagaaccgactaagaagtcgccaatacacatcgaaatttcagtcagagtccactaccggcccgaactactgttgacttaccgcaagtactaccagcgcgagcgtcatactccgaacgtaatacagccgcaaccaccttctcccagacaaacacacaaacattagcagataaatttctgatcagcagaacccttcagaatagcacttacgtcgtaaccacactagcgagcggggagaggactagcgccgcaatgctggcagtggtctggaaacgtgccgttgctgcctctgcgtcttctgttggctacagcaccaaaacgcagttagcagaagtaaactaacgggtatgaggcggatgcgaaacgcaccgcaaatttcttgtacacgtagggcatggtagaaggcagccagccgaatgagaaggccgccaacacccactggcaagccagcagcggccacacctgccgaaacaccgcagcaccagacattgtttcagcgctctgtggcgacgtgggcgaagcaaacgtcatagtacttgcacttgtcgagctggggcagctaccacacgagctctgtgacagcagcgagttttcctctgcctctcgatcagctcgctcctcaagctccaagtctcgctgctgtcgcggcttcgggtcttgtaacgagtttgtacttgccaccgccttctcctctgacgccttcacttcttcagcccatggatgacactgcagaaaggcgaacgctgccagggagaagcacatgattgcaccacaaatgaggtagaacgccgagacggagaagcgtagagcgcctcccgggtcttgcacaatgcccaacagagctgctagcgacccactgagcccttcccccgtcgccagagcactcgtaaacagcggcgggaagctggccacgaaagggtagaacaccacgctggacgtcgtgctcaccatgcccccaaagtgggtcagcaacaacatcgctatagcgattttacaaacaaataataacagcaacagtcagttcacactctaccggttcagccagcagtagaacgagcctaccgaggctgtgtctttccccgaagacggaggccgtctgcccccagagcagactcatgagcacagccaccaccacgccctgcaccaagatccaccagatcacgctggactggctcagcagctgctgctgggcgttgaacagcatgtagagcatcgggtagatgttggcggactcgagggcgagaatctacgtgcacacacaatgtgaccataaagagttaaggaacatgtagggtattctaccgtgtcattctaccgttctacattattttgacaaaacgtgtatgttattctgcgttgtattaccgagtacgcgtagatccggtagtgctccggcagctctcgcaggaacaggcccagctccacgtacgtaacgttggtgagcagccacgaggccagccctaggcccacgaaggccgtgaacgtggccgcgcgctgttgctgttgacgcggccgcgagatgcccgagctgccgagcccgggtcgcagctcagccgccgccttgagcggtagctgctcgctcggctcgtccagcgacatcatcctcaaagtgacaaaacccgtgtggtgtgaaaatagaaacgcatcctgtgacatgggaacactcgttgtttgtatgtgaacatagtgtacccctggaggggtgcagttctatttccctgggggcgtccgtgagaaccccagactgggtcttagggcctgtttttgtgaggtcaagtcaatcacttgtgtcaagcattcgtaagacagtttgacgacaaatcaaatctagtgatttgattggcgaatagtacgagttgccaattctgttggcactgccaggcgcagaggctctgctaggaaggcccgcgttcctcttcgctactctttttgatgcatttcgttgcacttcgtatcctgactaatatcgggcgcagcatagtagtggtagtaatgattggcggttcgatagaactgtgcggaggagcgctgcgacaccaacaaactccctctacatatttaaaacaccacggcgagcttagatcgtttagatttcctagtactccagtagcaggccgagcaaactggtaagcgccttcagccgggctgatcaattacatttattcccgagaagtttcgccgctcatttgactcttagaggccctcacgtcgttttgtagttatttgtttgcgacaccaccaacagcttgcctacacgtggccgcgggtgaggtcggtggtgtcctttctttgtagtgagtctccgaaaccactttgcagaaggcgatcgaaaagtagctcagcagtggagacttctaaactcagtgcttgggtgagctttcaataccgtttacagacccacaccttgttgggttgtaccgaaagcacatcaatatttgcatcattttcgtcttgttgttgttgttgttatctttatccggatgtcgccatatgcaactggagaagggaaatgtacagtaatctaatctagtactactctcacttattgtacgtattttggcgggtgagctgttaattcaggcggaattagagtcataaaagggcgatcaacgcttatttagtgctaattctgcctaagattgtcagcgcttcccctaacttccgcgaacagcatttgagagccaatcgacggagatacgagcagaatggcatggattggcgggtaggaaaccgccaagcgctctggttccgcctaacgcaggctggattagcttaccggtattccgccttaactcggcctcaccatcgccgctcctaattcggccacgaagggacgacccggaattaatatgggaattagctaactcggggcgtaattaaggtcgataagggattagagttataccagaattatcacggcagaataagtgagaggcacaatactacataatacatgtaataggaaatgtattttgtccgtcaaaacgtaagacagtttgtcggacaacaatttgcaccatgcgattggccaaaactttctgcacgaaagagggtagtgtcgttgcgtgcgttccttcgttgagcatgtaggaacccgaggacaaccgctttgccgtttttgaattgctcgtgccacctacagtcgagccgacgaaataaggcgctcataagcacgaacatgtagtcggtagtgcggccctactgccgactacaatgtacacgcttgtttgagaatggttaagaaataaatgcacccgaaccattagcccagcttgacaaacaaaacgttcatggctttatagtgaattctagttaatacacagcccctcttcctccggtagtgcggcccacgaaccctgttgtgtcctctgaggacgcctccgagtgaaacagtcacgacgaccgcgcacacatgctccgcaccgaggcgttgtcggaggacgcgagggagtaaacattcaatacattatgggatcttaccaaagccatgaaatgaactgttttgtagtagcaacaaggcagcgtcagccagtcttggtatttgtatttgtatttgttgcggtttgcttggctaccttactcccggaggcgcacactgcggcagctccacctacgtcggtagtactatgcggtacacagactgggtcttagtgaagtcggggtgtccttgccaacgacttcttgtattcttttacaatacattggaaataggaactattttaacgcctaatccagtacattcaaatggactaacaggactaatcgtaccggttgtgtgatcaatgctgagcagagcctgtttttttcgtaccggtagtgtgatcaatgctgagcagggcctgtttttgtgaggtcaagtcaatcccagttgtaatactggaagtaagcttacttaaaattactgtagtattatgataatcgtcggctgtacggttcccataccgcccctacgtaggcaatggtcggaaaccatgacggcgctttcattatacatttgtactggcagagcgtgagagaacatggcccgagtccgctgggtcctgctgcttgcggtcgctgctgtcctcaccaacgctagtgcatacttcgtcacggagtcgaagctttcgctcaattccgagccgtccgacatccacttcaatcgcctcctgagggtggtcgacggtgaagagcgagggcgcctcggaggggtggccgtcccgttcctcgaaaaggccaaaacggtgttgctgcccgccgtctcgactgcgaaactctcgcagtgggtcacaaaggggaaacctgtcaacgaggtcttcgtgcgcctgggcctgaagaaggtcgtactcgagaagctgtttgagaccccgcagtttttctcgtgggccaagtacgtggacgatctaggcaagcaagcgcccgcaaaggcgccaacgatgattccgaccctggtgactcagtacggcgacgacgctctcgcaacaagtctcgaagttagcctccacggagcaactcgaccaattcttcacctgggtgactaaggggaaaactccggacgaggcgtttagcctgttcaagctcgacaaggcagggagtaaactcgtctccagtccagagctggacgcggtgagaagctacatcacggtcttcaacaagcagaagcatacggagcagacgacgctgatcgcaaccgtgctcaggagctacggcgacgacgtcgtggtcaacatgctcgaggcggccaagaaggtcccgggtacggccaaggacgccagagtctcgagtccgagctcatgaagcgctggatgcaaatggagccggacgacgagttcacggcgctgaagctcaacacggcaggggagaagatgttcaactctgcgcagctcaacgcgtgggggaatattgtggacgaattcaacaccctcaaccccgacaagaagacgaatttaatcgcggccataaccaagaactacggtgacgcaggcgcggtcacattgcttgaagcggctaagaaggtgccggcctcggccgtgaccgccacgaggctgcagcgcgagcagctcaagtactggctgagcatcaggaaaaaaccaagtgaagtgttcagagcgttcaagctcaacaaggcgggagacaagctcttggagagccctcagttcagcgtgtggatgaagtacacgacgacttcttcgggcgagagggcgacctggattccgcggccttcaaggcgctgcgcacgtacagcgacgaagaattggccaagatgatcctcgccgctgagaacaacccaagcttgaaaaaggctgtcgaatggacggagaaaaagctgttccggggctggttggtaaatgagtcgccttcaatggttttccagggcctttggcttgaacgagcaggggaaaaggtgttcgagaccccaatgatcgcctactttaccaagtacatggctcgtgccactgaagggatgaaagacagggacgcattgatgctcacggcgttgacggctggaatgggtgacgaggccctggcagcgactctcatcgcggtgaagaaggtcccaagcacggagaaattagccaccacgatgcagaccgaacagctcaagtattggctgagccaaaaggagatgacgcccgagaagctcttcaagaaggtgctcttcctggacgaagcagatgttttcactaacccggtactgaacacgtgggccacctacttgcaagcattcaatgccaacaagccagtaaaggaacaagcgtcgatgatccaagtcttgagaaatagcttcggcgacgatgacctggcaaagatgctcactgtagcaaaggaggcccccgagacgaagaagatggccacggatctggagacggcgctgctcagccggtgggttcttcacaagatgtctccgacggctgtctccgaggttctaactgcaggaggagtggcgaaggttaccagggcgaaacttctcgaaacctacacggccaagttcagggaaacctacccttagcatttgagctgatactacagtagaatctgacgttaccgagaaacactacgcagtgcttgtacttggatagtggaagtactttatcgaaaagacctgaaaaaatcattcaccgcttactcgtcgtcggaatttttgttaaagggaactagctgcaatagtccacagactgtccatgttgtggaacactttgttgtcgaacctgagctcataccttttgtaaattcggagcgcgtcacaaatttcgcgttgagctgggggccttgcctagttttggatacttccacacgtctttccgactgagtgttgtagctcagccagtcctcgagctacgccctccgccttgggcaaatattattttctgatgggttttgtctcccaccagaccgaacttctccctcagttggccactatgaacttcatagaaccacttcatgatatgaagtggttctgggtgcttttttttatattcacgtagtgttcgctcacttttgatgcaccgacaagattctcctaagtcaagtgtaatttcatcggcaactcgtcaagcacagggatgaactcttggcctgattgggcgtagcaagcgccgcagaagtaccgagtagatttaacagcacgtacaccgccactagcgcgacgtcgtaaccctcataatatggcgcagtggagaagagggtgaggcctatagagtaattcacacagtaatagggcataatgttgcttggactcgcacaaaatctaagttgaagtgattactagaaagcaatctcaaaacgttaaagaatgcgtagacttccaagatgacgctcaccaacgagattggccccatccaaagaaggctggtcgcaatttgaaggtaccgaagaagtacagtagctccggctttgaatacactctagtccatagacgaaacttaagacttgtttcatgcgcaaattgcaatcgtgtattgagatagatcatcctggcaactcggagacggctcgaaacattagttcatgaacagcgttctgtagattgtaacgcgtataacgcgtattctgtctgcacagcagtcattccttcggatcaaacagttgccatgaagactggtatctcatgctttacgtctgggttattgccgataccaagtgtaggagaggagtcagcgggttctgttgggcgccagaaatccaagcggtgggtttcgtacaagggaatcaagcacaagatggaactgggagcatcacaactctatctagggcggacgatgaaccagttggtataacagttcgtcttacactccaaggttattttactgggaggacagcattagctggctgaacagcctaaccaattttattgcagcccccccccccccaactttaattggcaaatgtcgcctgagtccatagtccacagattatggctaccgtaacatcacaaagtttgtacatttcgtggctggttgttccgagaatgtcgactgaatccgtagtgtgtaccacacattgtagtgagcagttcttgaatttatgaaatttattcggaaagtcaaaactaggatagctgcattttctccttataagctaacaaggccgtgctctgcccggaacagctctggaccttacgtcgctcttgggcatataagttagtgtactgcggcatcttgtttctacgtggcaatggcagaaaggagtagagatatgttattggctgagggtaaccactattagttgaattaacggatttatacgaatattgaccgttcttgaattcactagaggtttgggctggtagtgcatttttgaagtacttcagttctgacatttttaagttcaatttgaaataataggacgaaggaacaacatagtctctccctttagccacaagcgaaacgaccaattattcacagagctagaggtgttgattaccggacgtactgctgcggtactagggcttcacgtaggctaggataggtaaatgacagtattttgtttttcagaaaaaaaagccgttgcacatacatagcttatttaactacctgacagtagccggaaaaaaactaaaaaatcactcaaaccaacgcttactgattctcttatccaccatatcatcgtccataataaaacacaacctgctcaacatgaattcgatcagctgggcaacgtaaatgatgatcatgcagtaaggagatcgctaactgagtaagatggaatctgtacttccagcctaccgatcaagtgcacgaattaagaccgtttgatactgaataggaaggtacaaaaaatcatttggttatacttcggtagtgtgacccgtacgacccaagggcatttcctgagcctgcttcgcagccgcagcatctgcccagaaattgcaccgctattatccatagtatggatagtaagaagaaactggtttacaacataacacacgggaatttggtggttgtatcaagctagccgaccccgacgatcttaacgatgtcgatgtcgtctacgtagatgtagccgcgattcttgacgattcctgtcgagttgaacggggtacggagctccatcaacttactggaacgcgttctcgagagacggcatcacctcacggctccggtgctgaagctgcctgcgcacgaggcctgagtcgcgtgacctctgggtcttcactaattgtaccggccataatggctcttgccacaggccatagctaatcatgtagctgccagtggccgatgctttcgtcgtaatgcctaactaataagtcgtcaccgttgaaggcgggatcccgtcggcatgttgttggagcgggaaaaaatccgatggatgtcgcttgagtggcagataaactatctatcacaggtatatatacttgattaaaggctatgcaaaataataggtaatttgacttagtctcaaccggatgggtcaacatagcagcataatttgattagatcgcaggctatccagtataacaggtattttagaaacccatatttagcaggtatttgatgtgagaataatggcacctcagtatggactctggataaaatccagagaacgtttactcaaaatcattgaaataacaacgaacggattgctctttttcctgcgtctgttcgcgcccatggcgttttggccccgctctaaattgactaaaccccatgaatccttcttgtgtaaaattgtatagctggaatgcatgacgtcaacgcgctcggccgggggcaaagcccccggccgagcgcgcctttaccttttttcgtgtcttttgcacggcaacttcgtcatttttttgccaggaaggcgctacacccgcgtttttcatacctcactccgtgaacacgtttggggcaaaggcgacagttctttgatcaccgaaggcatgcctcgtaatgggtctcgcagagatttggtgcgaggcagccgccaaggtggtcttgaacatgccttgtcccaatggagtgttggctggagtcgggtgccaagcgcgagacgttgttctgttgagcttgatcgtgacggtccggcacctcgacgcaatggcaggcgacttgggctgctggtgctagagctgcttggccggctcggtcggggtggatccttgggccaactggtctgctggtgcttgggctgttccagcttggctgctgggagcgctcggactgctcgaaatacttaggtactgaggcggccggggccagatccgcccgcaagctaggggtgtaagggcggcactggtggcggtgtcggcgcaaggactgatgtttcttgggagacttggtcggcttgatgggctgcttggactgccgcgagggctggtgccggacttggttggtcatggtcgctgctgttgagctggggtccggctctgtcgacgctgtgaccacctacagcatggtggaaccgcagggcgaaagcgctggaggacacgaggactgactggctgctaaacgcgccgtggtagggggcaatcgttgaaggactcgctcagcgagttggctgcgtgcaagctgagagctaaagaacgtcgccccctaaactaaaactaagctgaatgttgttggccacgcaggcctagtgcaaagacttgacataccgcagtgttgaggcgcttgaaaacgtggttcacttcttcggtcgaaaagcctgctttccaccgctgcgcttgtacaaaacacccattgaaaacttgccaccaattttcatgttacattactcttgcctaccccacgtttgcacacaaaggaagtctacactgtcctcccagaccaaagcttcgcctctagtccttactcataacaatactatgtctctggtaacggatattggggcgtcgatcagaaagccgcttatgaaaggactataaaagtcatataaaattttgatcactaaccaaccggcctagagttttgtccgaatttgtgggaaattcattccgcggcaaatctggatggcgaaagcaacatgggcgatcgtcttcagcctagacaaaatcgcacatgttcccgatgcgtccttgctaatctaattaggagatcgaatttagtaaatcagggattgtagatcttaataagccactacagtaaattagcggattaataatccaataaacattgttactgtatcggttctcaacaatacatgtacatctcttcggatgggataactgtgttgcgctttgcagttgctttggcaaaatcggacgtgtactgtactaagatgcagttaggttatcgaagcagatttagcccgtcacttgtagagaattaggagcgagaattgcaagtccgacagaagaacttgcgaaggccgagcgctcgaattttcgcggctttcgggcttcgagtgttgtacctttcgaggcctacgcaggactcctacaacagcgcatttgaacgacctgactttgatataatgcgtgtcatacatttacgtatgaagtgcatgcgtggtcgataaataacatacaagtgcccgcccttctccgtgagttagcgttgctccaacgggctccgaggctcctgcatcaatgctccccagcgaatcgttggtaacgatgctgttccagatagcttgctgttagactcaatcttcggctccatcgtccgggattcgcacagcctatcccctaaggtttagagaccaccaacgtcagattaactgactctcgaagtcctacgaaggactcgccaaaaaagcgacaggaagacgcttttggtccatgattaggtccgaatttctaaaacgaatacaggtaatggatccagatcacatgtcaacaaatgttatacatgtattgtgcaagcagcacatacctaagcttagcgcttggcaactagtcatcgactcagtgatacctatggccgctggcacaaaattgcgccctatttcgattgcaaggtacattcatttgcggcctacctgtaaacctcatacaccaaagttttggtctatcactgtgagagggactcaggtattcaatattcgcctcactcccaggcgggtaatgggggggggggcacaaaaattatcatcctaaacatcaatctctccaaacatctaagagagagatctgtacgtgtcgtgacaacataataaggtggtccacataatcgcacatagacagccttggacgccgaaggccccatcacaaggtgccgagcgcagcgaaggcggcacccgcgtgcgttctagcgggccgcagggcccgccctacaactatgtgctaataacacggcgagtagtgcagcaagccgacgaggcgagcggaacgggggcgattacgccacccccgccgtgacgcttggcctaatataatacttttcggaacacctgctattaattaaaatgggcccaccgcatagtagcagcgatagcagagtccgcttaaacatataatagcactgcgagtagtgcattgtggcagcgatagctgggcttgccctactacttagtataatagcaagtttggtaaaatgtgaagtcatagtaagcgatagccgcgcatagttagttatagcagcatgtagtcagcgataggagcgcttatttaagcgctagcagttttcagtgaggtacattgttgtcacttaacattgttcgctaacgacatcctatgaccttgtcggcgatcgtctcaatccactcgccctgcaacctatcgtggtgactgctgtctccgaaggcactccagccaggttatcgcgtgaaggccgcgagctccgaggagttcttatcgtgatttctctccagccaatgccccacatcacggtgggcatgggcgtagacgtcgtcccatctcgagcttgagccaagtactcgttggggccggtcttggatgctgtggcgggagtccatcgccatattggtgagtgtatccgccattttgttgtactctcgcgcgtggtgctgccacgttagcacgctcagtttgtccgctattcttcgactctgccaaaacagcccgtggagatactgtgctcgcggcggtgtcctggttctctgctgtcggatgattatgttgctgtctcctgcaacatgcagtggtgtccagtaatgccgtagacatactcgaagtcccgtgaggagtcccatgttctcggccaggttgtttgtggtggtcttcgcggcgtaagacatgctgccgatggtggggcgaaggcgaggtggcgcgcgtctctgtccatcagtgtagtgggcaaagtcgattgcgtgtcgcacgctgacgaggcgcgtggcgcccgagcgccgttcgcaccgagaagccgatccagaatcgtgaccgtcgcgtccgtcgtcggggtgcggctccagcccttgagaaagcacagcatgggggcaatttcgacgaggtcagacgtggcgcattgcagaaccccgagtcccgtccgcacgtccgccatgttgccatggtagccgatcacttggctgtagacataggaatcgtcggcgatcccaaccacaggtttacggagcctttgcccggcgctccgtcggcgtactcggtagcggcaacaggccgctctcgaaccagggcgctgcgaacctccacggtcgtgcttggcgtagaagtcgttcccactgtcgcggtggttccggccacgcttagcaccgtcccgtagacagcggcgtcggacgggggcgtcccaagaatgtcttcgggcatcagaagaacgtgcattgtgcgcagtccaggtaacagcatgagtagggagatcttgagggaagcggactcgttgctcgacggagcagattggagaatgagctaactctaaactaacctatgtgcagctgcaactggcggttccacgtgtcgcgcgatgggggcctgatcctgtcttcgccgtgcactctctcctcgtgctgagaaagccggatctttggccttttgccaaaagatacccagttgtagcttgagaggtccgctgtgaagtacccgagacgctgatagctgccacgaccacaacgtcgaacgtaattgaactcacccacttcgcagtgctcacactaatggtaggctgctggagcgtcgtagtcgatggcagtcgatacaaactggacgaggaaatatcagccatagtttccaacgagagcacctgcgactgccacttaacttcgatcaaatcagtggatcgcggaatcaagtaccctgtcagcaacgtcgcatacaacttggcatggtttggaacgcctacggacacaatgccgactcgggtcgcctgggttagttgtccacgagtattctccacgacaagcgtaggtgtgtcggccaccggaagaacagtaaaagtcacactgactgaggtggtggcctcattgccgttgcttgattcccgagacatcgcgctgatctgaagctgtgttgaaccgaaccaagtcgcgacgggagtgagccgaatgagcaagttgcttgacgtagcaggcagagccgccagaacgaacttgctgctggcattgtccttcaccaactgcgcaccgccagacacctccgctgtcttcagcgccgatccacttgaatccgaaatcacaagccggagtgtttcagaattgtcggcatccgtcaaagcgatggaggtgactgtgaattcgccagggacgttttggttgacacggatttcagttgtagcgatgtgcatcactggtgtgtctgcaacaactgcaacgctgactgatacactcgttgaaacgcgtgtagtttcacccgtcgatgtctcaataattgtggcgccgatttgaatcgtaaaactccctgcaaagtttcggcggggcacaagtgtcacgagtcgattcgatgtgatagtcattgccgagcttctcggtagaagcactgccgtaccagcagctgcaggagttgtgacagtaaccctgtcgacttgaattccgtccaagtaaagtggatcaaaactcgtgtccacttcaatgacgggcgtagatgcctccacaatcgtaaatgcaccagatatattttcgagcattgtcactgacgcactgttcaacaccagcgctggagtgttcggaacgggcgtcaccaccactcgacatctcgcaaatgtggtgactgtcgagagtgacccaaacgccgtatcgttgatcgagactctcgacaccagtttcatcgtgacgttgaaggtttgtgcgacgtatttgcgcggcatcaccgttatgactcggctgagtaaacacgacggctccgcagcgggtacacacgtgggactcttgctcccatggaattcgtagtgcaggtcgctgaacttcaccgttgatccccactgcgtctcagcttcacccgtcagcagcgtcgatccaacaatcaacccgtccacagcattgtcagcgatgagcgcctgcacgctcacgagatcattcagttcgctcatcagtccgaaatctgatagggggaacgtgacgttttggttgtcaccaacttggaagactctgatagatttgccgaagcccagagctcctcggccggcctccccaaccagctgtagcctaacgttggaaacatttgtaagcgttgtctgtcggagaatttccgtggttttagtcgtcaccgttgtcaacactggtccttagtatgagctctttcggaagcgaaggtgggtgtctcctgaaatgttacccgccgaatacagtccgtacgctccaacccctcgtagagcagctttgttcaccgacatggaaagattcgtcgacaatgagtccacaatactttgtggggcaattgccaattgactggccatacccccagtaatggatcgcccccacccgtcgtacgggaaaacactatcaaacgtaagcgaaatcggtttccccccaacaacgaagcctccacgtgaagatgtagcaagagaagaggacggaacaatgggtcgcggatgaatcatgacaggaatgtccaggatcacaataccgtcgctggcgccttgatacgcggttcggttcggagtcgatgcaatatcgaaagccaccgtagttacgagagtgaataatttcatgtagccgtaccaatactcccgaggccgcacactcaccacatcccttagtgtgtacgggatcacgtagagatccacagctccaagtgtaagtgctgccagccgcttgaagccagcgtaaatatcagcaacctgggtcctattctccacgtaaaggagaaggtgttcgcggtttacaacttcttgctgcgcatccagccgctgaaacggcacctgcacaaattcgttccagtatgcgtgagatactgagttcaaacgcacaaccggatccaccggggtcacgagtatcgttgctacgacggatataaatttcgtctctccagttgccaactctgtggtcttgacggtcacgtttaccataaagaaccccacaaaatccgctctaggtactacggtgaatgtctgatccacgcggaagaccggttgtgaatccacacgaggcagaacggccgtatcaccaccagcaagcaagttctctgatgcatttgtcccgtataaactcaacactgcggaactattcaccgccacttgcgctgaaagaacctccgatccatccgtgtcaattgtcgagccaaccacttcaatagggacagccaccaaaggctttgttgtagtcgtcactgggttcaatactacattggcgacatggcagatcggagtaatcgacaccagaacttggagtgatcctgcacgagcgacagtcgtgtcaggagcaacaccagaggcaagtaaacctctttcaacggacgtgctccagatgctcaaatgcagctcgccgctgtatcccgctaccaaaccgatctccacactgccgtgcatctccacaccaccagcaccgaccgcaacaacgcgctgcgacggcgcaccaaacaccatcgacggcaccgctccgtccgctttcgtcgagaacgacgccaccgactcgcccgatcgccacgtcacaaatgtcacgtaccgatcgtactcgcccaaatcaacaaccaagaacaacgcctcggacccgtccgcatccaccagcaacgccgacaccgagtcgcacacggccacgccgtcttccaccgcgctaaacgacgtcgtcgtcagcgacacgagtggcactgtcgccaccggggtcaccgtcgcgctcgacagaacttcgtacgtgtcctccgagacgaaagcgccactgcggtcaatggcgtgtgcaaccagagtgcatccaataaccccggagaagtacgacggcggactcagttgcacacttaggtcagcctgcgtgtcactccggtaagtagcaagcggacgcaactcgaagctcgtcgttgatgaagtcgtatccaatgaaccattacttgaaataccgtcgacggacaccttctgccaggaggtacctccgcactgaagacgtaggtacatgctttcggacccgtcggtatctccgagggtccaattgctcactgtaaccactgcgacgccgttctccacgattgacagctcacctggagatgccgcaaacctcggagcctccgccactggatagatcaccagggccatcgactgcgatgtcaccgtcatggatttccactgcgcagaaggtagacagctgtaaacatctttgctgctggaagcacgtagatagcactcggagccaaagaagtccgagcctatgtccactgttgacgttaccaccagcacatccacgctcagattccccgaaatccttgcaatcggcatcaatgacaacgatgttgtcgtaaccttgccaacgcctgaccccagggttgttgaaaacgacgaaagcaggtggctggaaatacctgatgtacctgtagaccagctctggcccaaggtagcatccgccgcttgagcaatataagcaggtgggtaaaacacttggacccggtagtacaactccgccttcgtcggcaccaccgtgatgttgccgtagaacacgccgccctcgctgatcgacgcgttcgacatcgcaatagacaacgacggcggctccgccaccgtcaggaaatccaagctcattgcgaccgtcgtcgcgttccagttgctgaacgcatatacggacgcgcggaggaaaccttccgcgggcgtctagtggctcggaccagcagcaatatgcacagcgtccgagtcaaccggaagctgtaccaccacgtataccacgccgcccagcgtctccttgccgctcatcaacaccgacgacccattgacagacacttgtctccggtagcaacacttccagagtcacgttcatatccgcagcagtggcgtccagctccgctacctcgagctgcgagatccacaacactgccaactcgtcctcgtacaccctagagcttgccttcaccacgccaaacgtaggcgcctgggcgtggttccactgtgttggcagaacgctctccacaatcgacgctgtcagccacgcatgctcctctccactcgcaccgctaactgcatcactcgacacaaactctgtcggaatcaagttgctcgtcactgctaccgactgcatcgtcacaggcaaactaccgacgtaatccgtaggaggcagcaccgcgaaggtgccgttcagactaatactccccgccttctcatcaatcgtgaacataccattcgatggccacggagagctgccaacgcccgcactgcccccgctatacagccagaacaacggcgattgcgcggacaccacagcgtctgcgttgctgtccacgtcaacgagtaatgacacgatctcagtgcaccacgtgctcggtgccgcgctgtcgcccacaacaatgcccagttcgcggttgaaccccaggtggaccaacgcagatccgttcggcgccgaagtgaagaaacgactactcgccacaggaaccactgatacccgaagattggccgcaagaagatacacttggctcgtcgtcgacgaatgcgcctccaccgaaagcgacacggtcagctcgccgtagtagccttggcggggaaccacgctcacgttctctgacaactcaaattcaaacgactgatctggggtgagagcaaacccgagtcgccgccaaaggaatgcggtgccgctgtcacgctcgcatcgtccacgaacaccgcatcgacgcggcctgcgtcccaggcgagccggcacggaccgtactgcagcccgtcctcggcagccaacggaacgcctgccagtaagcttgcgcgaatactgctcagcggaatcaccacagccgtgttttcttcagcctcgaaccaaacgtccagcggcgtcgcatagtacactgcgggctctggcgtccaccccacctcggccgtgtacaccgcagtggccacagtcgcattcgtggtggacatgttcgtgtagtagagctcgcgggacgtcgcggtgagagatacgctgaacgtgccagagaacgcagcgtccaatgccaccagcctcacttctgcgtcaacgatgctagcgagtgtcgacgtcggcaccggtagcgcatacgcaacggactccgaagtcgtgtcaccgttggtagtatctggctgctgcaactggctgttgaaaaacactgccagtgcttccggccccacctgcgcagacagctcgacggaaagctcctccgagccatccagatcttgcagcgtgatggcgttgaccgagactatcagcgccgttccatgcggaggcgtgactcgggcaacggtggcattcaggagaggaattgtcgctacgggcgctatgaagagatccacagttacaattagcgtaacattaggaagtgctccaaactggcggtggcttgtggatgtctccccagccggaatgtttttgtcttgaagaatagctttcagctggacggttgcgtacccaaagtagtaacgattttctggtacaagttgatatccgttgaacttgtcagcttggacagcaaacgcaagcggagtcgacgagatgtataacaggaaatctcttcggtaagcgggatccacgaacacggttgaaataagttcatccaacgtctcctccgatatggtcgtgttgtggctttcatctccaagtagatccatcgaaactggatcgacctccttaggggctggcagccaatacaacagcaccttgatttcgacctccagcttcatcatggaatacttttccgtaaatatataggcaaaggaaaggttagtcacgcctgagaacccatcggctggagcaactagtacgaaattgctttcactgacgtccttccgcgcaataggcaaaatcacattggtatggtatcgctgtaatcgtgtcgtcaaattccgcccgtcaaccgtaaaatttcgaatgccgttgaaacgaacgccccgcaattcactgtcgacgaaccaagttccactgttgttgctctgttctaaaatgctcgcgatcatcccaactggatctgcgggtaaatgaatcggggtctcctactcggcctcaaacaccaacgcgtcgtttagcgcgtcaacaagaagtatcattgggtcgaatacgaaatgggttttgtgctgaagctgtaccacaaagagatccccagatacaacgtccagcagtgacacattcaccgacaagttcactggttgcagtccgttcccacgcggggctagcactaactccgaaaattccatccaggttgagtttggtacttgcacagtactgccaacagcccagtagcgatgacttctggttcgatagagcagtacccaattggaccattctggtagcgccatgctcatatttaaaaaaaatccacacaacgccagaccgagacagctccatcactccacgatccagggcagtagaaacataccttcttgggaataagctcacagtttcattctccaaaaccaccgactccatggtgaacggtccgacgtattgggtggcgttgaccgtgtcattggttggaacatcaatggtctgagaattccacacaacacgaagaggacgcgccacctcgaccgtctccatcgagctaaccttggagtggaaagcaagctccacggatccgttgaaaatccccatgaacgaatccttccgatgcagctccaaaccgttcaagctaacgttttcgccgttcgtaccagctaactcgaggggagagatacgacgagaaatcaactccaccacacggccaccgctgcgcacagcaacatttaatggtgatcccaaccgatcagcattcgtaattgccttggccacagctactccatgcaaactgacatccaacggaccagtactccgaccacacagcggcgctgtccagcgactcgctcagcacgttcaatgcgctcaaagacagcagcgccggctcgtcctctctgctctccaccaccaaccgctgcgacatcaccgccgacgacaccagcgagcgagggtctgggatgctccgaaccacatgccacacctccaccaccacagcgcgcgacgacaccgagtccaccagcgtcacgctcgtggacaccgtcacggtctgcgacttggcggtgcgcggcgccaacaccacctcggctgccttcagctgtggtgtagcgggatcggccaaaatctggttaaggcctgatcgagcttcccatcagcgcccagacaccgactaacggaggggttcccccaacgatccgtgatcggctgaacttgttctcaccttgtgtacccgtcggtgggctggatctgctctctcggggctccgaagatgcagcacttggtgaagatcgagtgtcttggcgtgacgcggggatagtttgtggagcagcgcggtagtcttcgctctgcgtccgagtatacgctccgatcgagggttgttcgctgcgatcggtcggcctggagttgatccaaggtctgtgattgcctttccgggtgtgttccttcctttcctaagttgcttgccgcttcctatagcgggatcgaggttgatcgagaggagaaacggtcgccggtcaagcactaatacccggtcgatcgaggacttgcacacaagagatagatcactagagtaggtcaagctggccaatgtattaatccagtcttaaccgtaccgctagttcactacccaaagtgtcgacgctgccgaggccaatgtagttcctgggacttggtgacttgatgggacttgtggtcttcggtgcaaattctgctctgatttatgtttagctggtctctccctaatgctaccatcttgcttaccctcctacaaccacacgattactggattcttgtcccgacttcgtcctccatgtgcgtcccatcctggtcgatccacgatcggccccgatcggtgatccacgatcgacctcgatcggcgatcggcgatcaacccccgatcgatgacttatgccggttgccatgcgccgccgatccatcaccttctgtcctcggccatcccagatccgcgagttccgtcgtcgatctggacttgggtcggctccgaatcacgccgcggttcgagcacgatcacccagaatccggcttgccacatgtcctgcctcacgcgccggcgtcatcggaccacctgagatctcccgaagaactccttctgatccgtagatccttgcggcctgtctctcgatcgccgatctcccacgcctccagtcgatcggccctgccgcctttctcggagaacaattcttattcagcacttctccacatccgccccctgaccgtaagttgtgtcgcacggcggctcacttcggacagttcgaccttggtcattctccaattcgccggtccannnnnnnnnnnnnnnnnnnnnnnnnnnnnnnnnnnnnnnnnnnnnnnnnnnnnnnnnnnnnnnnnnnnnnnnnnnnnnnnnnnnnnnnnnnnnnnnnnnntgatccgcgaccgggcgcgccgggacgacaccgtgcgcgagctgactgcgaacctgcacgacttggagcgccaccgcagatccggcgtctacagacggaagtcagcgaccttcagcagagtgcccaggatcagggtccgcagctgatacaaggcctccaggatcagatagccctgcaagccgccgagatccaggatctggatcgccaactgacacgcactcaggcgcatctcgcgactgctaacgccgatcgtgatcgactggaccaccagctcgatctcgccgcggcggacatttcggatctccgatcgcaggtttctgggcaagagcgcgagctggacgaggtgaaccacgagttggaccttacacgcggtagcctcgatcgggtccagactgcccttcggatagccgaaacagccgcggccactccggccgctccaaccccgacgcctcccaccggacccacgcccgacgtcgatcgactgcagattgccctccgccaggtgaatgaggagctggatcgggtgcgtaccgcccgagataccgcgagagaccaagccaccgctgccgtgaaagacgtcgatcaagctcatcaggaccgcgacgttgcgctccgagagaacgccgatctccgtacgtaaactttccgtgtcgcctattccgttgtcgatcgccgctcatgccgtcgctgtgttacaggatcgtgtctcaaaagcgcgcaacaagtgatccgtgcccaagacacccaattcatcgacgtccaggacgcctacgctatgttgcggcgcgtcagccatcgatccaacgaggatctcgagaatgtggcagacgccttatctcgcgtagttcggtggattttacttcgcctgtgcgcgccgaccacgcctgtccgtcgtagccgcagtcgttccggatctccggactccgtcgggcacatccacaaacgtgtccgatcggcgcctccaccacgcagtcggtctacgagccgatcacccgctcggtctccctcaccttccttttcgttacccggccatgacgatgaactcccttctgggggtcagcctgccgaagatcaacccgcaaagaaggtgcctgctgcagatcaaccgccttccgatctgaacgatcaagagggatcggaccaagaagaattaggttcaccccctcgatctacgcaggaagacgggtcggaagaggaggaggagtctccggcccgatccgcggccgacgaggcaaattccgaatcggaggggcccgatcaagagaccgaagaagaagacgactcggaggggtctgatcaggaggctctagcagccttagctcgatcccgatcggaggctcgccaccgtcaatctgcctcgccggcccgtacccacacttcgccggctcgctcgcgatcgcgatcgccctcagtcgtgtcgatccactcccagtctggatcggctcgctcccaatcgtcccacggaacgcgtcagtcccgtcatggctcacctggaccgacgcctccgggatccccgcctggttctccacctggatcgccgtcgcccggttctcgcctggatcgccggggcgtcgtcctctggtcccgccgttgttcccgatcggtactatgatcccgggtttcaacgcccccagggcactcgctcagactgatacagacccctggccttcgatcctgctgggacagctacagatcaccggcatgatcctgtcgacgctgacccaccatctgctcctacccgtgggctggctcttcccgctcgtcgttcggggcattgcacagcctgcggccggggttggctatcgagacgacctgatcaccggacctaacattaccgcgctgatggccgatcgcccctggcaggcgctgcagaacccggtcgatccgttgaccttcgatctggcgctccatcgaggcgccggcacccgattggatcggatcgccgctgcctatcttcagttcgaagagcagaatcgccaggctttctgggaaacaactcattatctcccgatcacgggcgcccagcgtcgggatcagatcgtcaagcgataccatcgcgatcgtcgtgcccgacggatccgcctcggtgatcggtggcgccgactcctcgtcgatatgctgccgatgatgcgagagatgtgggcagacgtcgatctgctgctggacccattcttcctgcagatcccggtgcgacagcgggacgctgtaacctggtatcctggcgtggtatctcgcgctgcgaacatcggcaaccccacccaacaccatggtgaaccgactgacctccgaacggccctgatcgaggccgacacccatgatccctggcggaaccagtaccgcgcccacccccaggaccatccagcccagcggatcccgcgtctccgcaacaagttcaaccccaacgtcagcgcccaacaccagccgtgacatgatcgccgtctccacgatcgacttccgcgaatagcgagccagtcgaccataccccaagaatagaagtgacgcggaggctgatcttccatacgcgtagcacgaagtactcagattgatccattccatcgtcacaggtgggccaacttccgggcatagccctctttcactcgatccaggtacagccacacctgagatccagcttcgatcgagtgcggtcgaacttcttcattgtgtcgatcggcccgatccgcgatcgcttcgcgtagtcgatcattcacctgactccgagcctgatcgtagtgcttctggatccgataacgccaccgtcgaggatcccgatcccgagtccgggtactacccaaaggtatcgttgcctcgagcgtcgatcgaggatcccatccatgcaccatataaaaaggggggtccccacggacccgatcctgagccgtgttgatcgcgaaggtcaatcgctctgcgtactcatcccattccctctgatccagatcctccacgaacatcttcagggccctcgtcgccgtctgtaccattcgctctgcagtaccgttagcctgaggtcgatatgccatcgtcgctcgctggtacatacccaggatcttgttaaaggcgcggaagaagtcagccataactcccggctctcgatcgtgcctgatcacctcgctagcaccaaatcgccggaacacacactcttcgtaagattcggcgatcgtctgcgctgttcgggaggaactggccttctcgatcacgtatcccgtgaacagatcgacccagatcaacagttccgaattaccctcgtacgaaatgggtagcgaatgtatgtgatccatcgctacgatctggaacgggtatgtcgcctggatgtttcccgacgactcgcccctgatcgtgggtcgtcctttgccggtttcgcagtcgacacattcgccgacgtacttgtgcacacttctgaagagacctctccagtgaaagtgatcgcggatccgctggtatgtacgcccgatcccctggtgtccaccttccagagtggagtgatagtgatgcaggatgtcttgatgcagcgtctccggtgccaccagtctcatcagtccatctcgatctgcatccgatcgcttggagggtgggcaatagaacagcagattatcaccgtcgatctcgtagtccgctgcgaggttgccataggatcgggcctcatcatgtgtcagatcagccacatctcccctcagatacttcttcatacccgcgatccacgtttcttcatcctgtgctcgacgaatccgatcgatccgcaaccctcgcacgaactcctcctgcatgacggtcgggttcggccgtgatctggtgcccgatcgggttgtcatcggcgatagtcgggcgatcgactcatccgaccggacgaccaggatctcatcaagtcggtttagtgtcactagatccccatgatcggcatcctcctcgacgacgacgcccccttcacgttggagtgctgcactggccaggctgtccgcacttccgttccagtctcgtttcacatgtaacagctcgtgatctggtcagttccgaagctgatccagcaccttctgcgtcaacaatgtcagcttaggtgctttgcagtcgatctcgccccgtacttgtcggatcaccaggttggagtcaccgcagaccactaacctgcctcgatctatgccgtccaggaggccgaaacccaacaacagaccatgatactccgcctcgttaacagtcagcccttcggcatagcccgatcgagccttcaacacactccattcgagtaacttccacaagattgcactgtacgtgcccccgcctcgcttgacgcgggcggattcattgaaactcatcaccagcagctctgcgtccgcacgcaccgtcgggatcggggcttgaatcttgcgccggggttctttcttcggcgcgatcgcgatcaacgcgtcgtccagatccgatcgaggcgtaatactagcggcgatcgcccccaatatctcgtccttttccttggtgtacttcgtgatctccagtgtccagggcgataggagtgcagcccactggcccactcggccttgaagaccggatgatcggaacagacaccccaacgtcgagtgtcgggtcaagacccggatcgatagtccaaccagcatgctatagttcaggtccaggatccgtgacagcgccagcacttctttctccaccacattgtaattcagttcattcggcttcagcgttcgactggcgaaagtaacgggatgatagatctggtcgtgctcctgcatcaatgcggccgagatcgcccagtcactggcatacacaatcacgaccggagtccgatcgcgatcgaagtgccgcagaatcggtgtcgtcgcaatcttcatcttcagggtcgaaaaggcacgatgagcacggattcagcggtcatcggcagcaccgacttcaggaactgatggagtccgatcggggctcactgggtccgtatccactaagttcggtacttgacgatccaggatctggcgcagatcggggcgtttcttcagctcggcgaagtccacctcgcgcagttcgtacaggatcgccgcgtaaatcgcgtaatcttccaagaaacggttgtaataattgagactgcccaaaaacgattggatcgatctgagcgatccggggaacggcagatcggtcagagcggtgaggtccttcggattggcttccagcccgtcgttcgacacacgatgtcccagatagtccactttacgcattccccaagagctcttctccacactgatcgagaggttccatttatcacaagcgtccagcacgcgatcacacagctcgtcccatgatccggccgtcactaggatgtcatcaatgtacgatctgcgacctagcactgatgggcgccccggatcttctggttctaccgactcaatcaagtccgtggtgacttcacagtccgacgatcgcgggatcctnnnnnnnnnnnnnnnnnnnnnnnnnnnnnnnnnnnnnnnnnnnnnnnnnnnnnnnnnnnnnnnnnnnnnnnnnnnnnnnnnnnnnnnnnnnnnnnnnnnnnnnnnnnnnnnnnnnnnnnnnnnnnnnnnnnnnnnnnnnnnnnnnnnnnnnnnnnnnnnnnnnnnnnnnnnnnnnnnnnnnnnnnnnnnnncatcagcctggttagactgttgacgagccgataatcgatgcagagtcgaatgttcacgccgttcttcttcatgatcacgacgatcggcgaggcccacggtgatcgagatttccgaatcatcttggctgacaatagtcccttgattagctcggacaccttctccacgaactgaggggcaactttccggacacgttgagcgatcggcttcgcgtcgcccacgtcgatgtcacaggtgacgccccgggctgctgggggaagttcattgtccttaccgatcagcaggtgattcctgtgccagatcttctttcgcagccgatcgatctcctccggggtgttgaactccagatctcccaccttgatatcatcgatcttcacctcatccgtcgtcgagatcacaatttcaggaagcacggctaattcaccttcgacatcttctgctgacaaattcccgccctcgtggtaatggacctgatcatccgcgccaacgtctccatctggttcgggtgcaatgagatcgtcccgatttgaagtgggtttggcctccatttccagctgatcacctccaacgatgagtcttcagccacttgcggcagtcgttcagatgcaggaacaccgtcgactgctgtatcgtcacttgatctcgactgttccacagctaagaccgcaacggggtgtgtccgatcggtattccgcccccaagatctggttcgacggtacaaccgtcgacctgatcggccgagggcaagtgaggggacacgatttcgcccttctcggcggctttaccaccggaatccacatgatctggcttcccctcaagatcgccaacacgatcctcttgcggcttcgcgtcatctaccggtgcacacgcttgatccgtgaccggcgaaggctggaagtccagctccgcctgtttccgctttggagagcattccttctctgatccggaaggttcccacaccgactcaacaggatccgaccgtgggtctggtggatctccgacgcggacagttgaagcagacgaccccgactcctctgtcacgcgatcatcgtcctgcaacggtctgccccctgatctaagagtatctacgactgccgcccccggatcagggctcattgtctccggttcgcttgttggatcgggaggacacgtcgactgatcgacgatcggggatatctggcatctctggaggatagttcggggcgttgaataaatcggtcgctcgacggcaggtaccggaggtcccgttggcgcctcctggttcgtcggccggtcatctgttgtggcttaaaaggctagattctgccattccatttatcgacgagatccgatcgacacatatcctggaatccggggtatccgatctccagccagccacatcctgatccgttcattccggtgcaagacgaggtctttgtcgctgatgtcggtaacctggagatatctgatcctgccgggtcctcggaccacgattggcacccaacgatctccacgggtgacccatagcttttctcgatccgtcaccttcattcgcagcggaagctcgatcgaatccccgatcgcgatgtgcattccctgatccacacacacgtgtcggacaatgtcgttgtacagttgacgccgtccgctaagctggatcttgacttcgtcggggagacagatagagccgtccgcaagatcgaggcggatccccgctggaaccataaagttcatacccaggatcgcttcttgtcctgatagatcgccgacccaggtatcgaagaaatacaccagcgatcccgccagcgtaaccttgatcctggtccttccttccgtcatgtacacgctttcgccaatccccacacattcctggctctgactcgtgtcgacacagcaccccaccttacgaacaaaggcggtgtccacgatggacacctcggcgccggtgtcaaagagtaagatcgacttttcattgttgatcttgccagtgatcttggcctgacggaaccacttacctggcgaatgatgtttccagtaccctctggactccccagggaggagatcgggcaccacatcgccagatctgcggtgttcgctgacgcgacgccgacttcgatcgcgatcatgctccgggatctcggtcgtcacttctccatcagctggcgtgaaccattcttccggtctgcgttgcttccaatagccccgcgtttctccagactggagatccaagggcacttcggcgtcagaacggctgaagtcgtccgatcgatgtagacttaagaccttggcggtagatttcgcatgcagatcacatgtattaccgcgtagatcagtccgtccacttactcgatctaccgtgttcttgttcacgaatgcatagaagcagtacctagaacgctcggctcgtaccggattccaacccggcgagcgtcctagtttaacatcttctcggcgatcgcgggcaacatgccagcgtgcttcaccgggttgaaccattgacggatctggttgtagaattcctccatcggacacttgcccatctcgtgtagttcaccacatccacggcacacaaacaggcagcgatccgccggatgacctttcttgccacacttctcgcacgtcaaacgtctccaacaatcgagatcggtgtgtttccgcgatccacaatgtgagcagcggtttgatcgctccgatccgtcaggtgaagatcgcgatcgtggatccgatcgaggtgggtcatggttgatctgcgcctggttgcttcgatccggcttcgtcgcgtcgcccccagcgttgcgggacttgtcctcggccgacgctaggtaaacgcgacgtagatcaccctccgagtccgatccgtctgatcccgtgtccgattcagactcctggctcgcgatctgcactgcacgcactgcccgcttggttgcagcagctggtgctgaggtcggaacgttctgacggtacttcgatccaaaggcagatcgcttctgtctgctcttcgcgcgctcttgagcgcgcaggacttcctccagatcttctgcgtccgcaagccggagtagagtgagccgatcggccagttccggatcgcccagcgtctcgataaagtgttcgacatgttctcgacgggccttggaatccccgtccttgatcttcaagcttacacgcagagccgccacattcagtcgatagaggtactccaacggcgattcatctgatctcttgcgagaatggtaatactgccaagcgaccgatactcccaggccacaatactggatctggaaactccggagtagatcgctccacttgttccgcgtcgatcggcccagctggtggtaccagttcttcgccgggcccgtcagtagatcagcaaaagtcaggcacttctcttcgtccgtagcctgatctcgcaggaacgccgactttaccttgctgatccacgatcgggcgcggtcttcgtcctgatccttgccactgaactccttaagatcggacatcgccgaaatccgcacacgctggatcaatgaggacccagtggatcctgaggcagcggtggccaccgcagcaggggccgaactcggtagatcaatgtcgtccggatcgtattcccactgagagagatcttgatccggcgatccggctgattccatctccacgtcccgcgatccaacgttgtcgtcgaccactggagtaggtgttacaaccgtggcctgttgttccttcagaaatcgagccatcgcagcctaaaagtaagactccagtttgccattcgactcatctgatccggtagcactggtggtccgatcggtcgacttgggtttctgcttccgaggtcctgatcgcatgcgtccctggcgttgaccccgtgatcgtgcgtccaacatcgcagatcctgaagggtcgagggacatccgttgaggttcagacgacgtatccgatacgtgttccgctgcggagacataaggagacgacgatcggtaccccgtggactccatccgcggcgacgacgcgggagctggcgacactagatctggcaccttcgggtccggactgtccgcgatcacgtcgaccaaaggtctcaacttgtcgaccaatgtctggatcgctgtctggatcgcatcgagatcctgatcgaaaagatcattcgcttcaaaggcgccagccacgaagccggcttccttcaacagtccgagcaggttcttcaccgccatgagcttgttgtccgtcactcgggggggccgagatcgggcccttcaggtcgtcgatctgctctggccgcaagatcaccatgacaggatcttgacgcaagaagtctcgcagtttccttcaagtgatactgacgatccaggtcagcctcagaccagtcgagcgccgacggtctgggatcttcgtcgtccaggcctggcgctctcagcttcttcctcacgatctggtccttgtccgcgatcgcgtccaggtagtccggatcgagcctgatcggcgagtcggcgaacgcgtatcggtccgatcccgccttagtttgttttgttagtgaatctcggttagcaccaagatccaccggggtccccgaagggacctggggagggtgttgaggttacctgtctccagatcgccctcgattccgtcgacagaagtcctccgagcactctgtcgatccgcggatctcgttttgttcagcagcgtcttcgtcgatccgatatccgacgacgcctcttcccctggttctttcttcacttgcacatcttctacggactcacggtgaaatnnnnnnnnnnnnnnnnnnnnnnnnnnnnnnnnnnnnnnnnnnnnnnnnnnnnnnnnnnnnnnnnnnnnnnnnnnnnnnnnnnnnnnnnnnnnnnnnnnnnnnnnnnnnnnnnnnnnnnnnnnnnnnnnnnnnnnnnnnnnnnnnnnnnnnnnnnnnnnnnnnnnnnnnnnnnnnnnnnnnnnnnnnnnnnnnnnnnnnnnnnnnnnnnnnnnnnnnnnnnnnnnnnnnnnnnnnnnnnnnnnnnnnnnnnnnnnnnnnnnnnnnnnnnnnnnnnnnnnnnnnnnnnnnnnnnnnnnnnnnnnnnnnnnnnnnnnnnnnnnnnnnnnnnnnnnnnnnnnnnnnnnnnnnnnnnnnnnnnnnnnnnnnnnnnnnnnnnnnnnnnnnnnnnnnnnnnnnnnnnnnnnnnnnnnnnnnnnnnnnnnnnnnnnnnnnnnnnnnnnnnnnnnnnnnnnnnnnnnnnnnnngtcttcggtgcaattctgctctgatttatgtttagctggtctctccctaatgctaccatcttgcttaccctcctacaaccacacgattactggattcttgtcccgacttcgtcctccatgtgcgtcccatcctggtcgatccacgatcggccccgatcggtgatccacgatcgacctcgatcggcgatcggcgatcaacccccgatcgatgacttatgccggttgccatgcgccgccgatccatcaccttctgtcctcggccatcccagatccgcgagttccgtcgtcgatctggacttgggtcggctccgaatcacgccgcggttcgagcacgatcatccagaatccggcttgccacatgtcctgcctcacgcgccggcgtcatcggaccacctgagatcgcccgaagaactccttctgatccgtagatccttgcggcctgtctctcgatcgccgatctcccacgcctccggtcgatcggccctgccgtctttctcggagaacaattcttattcagcacttctccacacagccagctcacgttgctcgactgcaactcgccagccacctcccacgcattgccgctgctgctgctgctcgacacgcgcttcagcagcacaaagtcgctccagcgcgggaccgacatgctcacgctcttcacgtccagcacagcgccgctcagtagcgccgacgcacggcccagagccaccgacaccgcctgcctcggcggcatcgacacgctctcgttcgcaaacaccatcgtgcgcagctccacggacaaatccaggtcgcgacgccgccacgagattgacagtggacgcgccacctccaccttctgtgccgcgctacgcttgtcgcggaacaccagcaccacagacccacggaagacacccgcaaacgaagccaccgggaccacctgcagcacgcccgctgcagcagacccatcatccgacgaggcgttccaagccagcgtcgccgctgacacgttcgacacgcccaccacgctgccgccagcacgctcttccacctccgacgaatccccgtcgagggccaagccgctcacagaagcgccgaggtcgcgcccgtgaacttccacgtccgcggaccagtactccgaccacaccgcggcgctgtccagcgactcgctcagcacgttcaatacgctcaaagacagtagcgccggctcgtcctctctgctctccaccaccaaccgctgcgacatcaccgccgacgacaccagagagcgagggtccgggatgctccgaaccacataccacacctccaccaccacagcgcgcgacgacaccgagtccaccagcgtcacgttcgtggacaccgtcacggtctgcgacttggcgatgcgcggcgccaacaccacctcggctgtcttcagccagctcacgttgctcgactgcaactcgctagccacctcccacgcatcgccgccgctgctgctgctcgacacgcgcttcagcagcacaaagtcgctccagcgcgggaccgacatgctcacgttcttcacgtccagcacagcgccgctcagtagcgccgacgcacggcccagggccaccgacaccgcctgcctcggcggcatcgacacgctctcgtttgcaaacacgtctgtgttgactgggtctgctggaatcgataccggcggctctgggtctgctgccgtcgcactcccgcaacaactcgacgcaagcagcgcgaagagcagacccaggccccgcgcgagcgcaaaggctcggctcgacgtcctcctcctgatgcttgtctccccagcccgcgcgtttcgcagccagctcctgcgcctcggcaatcttcggcggctcttcgcgtgacgatcgcaatatgcctgcaaaaaaattgcggaagaaattacactcgtacttagtagggacatactgattgccagtctcttggttggcgagccaaagcaagggcccgcactcggccagcgtaggaagaggaagaatcgatcatgctgtgcagcctcagcggccaggtgcccgtggagcccgtggtgtcgctcaagtcggggctcgtgttcgagcggcgcctgctgctcgagtacctggagcagaaccagcggcgctgccccgtgacgggcgaggagctggacgccgagaaggacctgctggcggtgcgcgcggcgcccgcctcgggcggcaaggccgcctccgccgccgccacggcgcccgcggcgctgagcgcccccgaggcggcgagcgtgccgcagctgctggccgccttccagaacgagtgggacgccgtcatgctcgagaccttcacgctcaagcagcacctggagcagacgcgccaggagctgagccacgcgctgtaccagcacgacgccgcctgccgcgtcatcgcgcgcctgaacactgagaacgcggcgctcaaggagcgcgccgcgcagctggccgcgggcgagccggccgacgtggacatgggcgcgggcgcctccccggacggcgccgcgctcgcgcctgaggtgttggcaaacgtcgaggccaagcagaaggagctggccaagcggcgcaaggacttcaagaagaaggacggcccgcagcgcgcagcgctgctgagcggcctcgacggctggacggcggcctctagccacacgctgcacgactcggacaagcccggcgtcacgtgcgtggccgtggacagcaagcgccccgcgcgcgtggccacgggcggcgtggacaagcacgccaagatcttcgacacggacaagcagcagctcgtggccacgctcacgggccacgccaagaagctcagccacgttgagttccacccgagcgccgacatggtgctcacggcctcgcacgacaagacggtcaagctctggaccccgcaggacgagggctacggcgtggtctacacgctcggcggcttcgacgacgccgtctccagcgcctccatccacccgacgggcaactacgtgctgtccgcctcgctcgacgctacgtgggctatccacgacgtgcgccgcggcgcgctgctttcgcgctacacactcaacggcgagttggccatgcccgacgcggccgccggcaagccgaagaaggcggcgaacgaggcgcgctgcgcgcgcttccacccggacggcggcatcttcggcacggcagcgaagagcaaattggtgcagatgtgggcggtgaactcgctgtcgaacgtggtcacgttcgagggccacgccgcgcctgtcacggcgctgggcttctccgagaacggctaccacctcgcgtcaggaagcgaggatggcgtggtgaagctctgggacctgcgcaaggccaccagcttcttcgagctcgacctgaagaaggagcaccctcagctcaagctgggcaccatccactccatcagctttgatgcgagcggctcgcatctcgccgtggccagcgcgcaggccgtgcaggtgctgaaggaagtgagcaagaacaactgggaggtcgtgaagacgttcagcgaccacaaggccgccgtcacgggcgtccaattcgcgcccgattcgagcttcctcgcttccacgtccatggaccgctcgctcaagatctacagataagcgcgcgataccagttcagatgctgatagccaggtggtcgactccgcaagtctttggaagctacaccagcaagacgacgccatggaacaagacgacaccaagcaataggccgtcgccgcgaagcaggtgaggtaaaccctttttctaagctgtttggctgaccagagttcctgtcaaagcatttcagtcgtagctgttcaacaggtactaccaagaaaaaatacacacgttgggcttggctggatgcaaggagcataacgggcagcaatgccttaggcaagaagagtgtggcttgtgattaaggagattcaactcatcaacgaaagatcgggccgctggaagacgacgatgaagacggccgcaacgcgcgcggcagatacccttgtaacacatcggcgtgctcgcgcagcagtcgctgcttggcggcctccacgacctggtgcctgtagttctcgtcctgctcctggcgctcccgctcgcggcgttcgcgctgcagctccgcgtacaccacttcctgcttgagcgcgcggtgccgggcgatctcctccacgaactgctcgcgctgctttcggcggaacgctgccagctccatctcgcggcgctcctcggagcggaacctctccttgagcatctcgttgaaggcctcttcgtcggcgcgctggcgggcgagcagctcctgcttgagcagcatctgcatctcgttgctgcgcatcatctcctccttggcgagctgcttggccgcgatcttctcctcctcctgcgcgcgcttcttctggagcagctcctcctcccagagctcgtcacgcagacgctcgatctcctcttcctcgcgcattttggcctggatctcggcctccacggcgcggaacatggcgtcctcctgcgccttcttgaccgcctcggaggccttgatgtcggcctcgcgagcctccacgcgccgtcggtactctgcgatggcttcgtcctctctgcgcgcagcttcgagtcgctcctgcttcatcctctcgcgctcctggtgagcctggtcgatcatctcgcgggtatgttcgcgagctttctctctgcgcgcgagctcggcggcgtcctcctcttcgacctgctgcatgagcttctcgatcttgagccgctcgaagtccgcctccatctgcgcttcgcggcgcagctcttggcgctgcagcatctgcgactggagcacctgcttgccctgctcggcctcgacgcgcttccggagctcctggttctgcatctccaccagggcgcgctgtcggtcgtactccatctgctgctcgatggcggcttcgcgctgccggtccagcgccgccagcgtctcgcgctcgagctgctgcgtggcgcgctccttgttcatgtaggctgtcttgaggaacacctcgagctcgcgcaactcctcgctggcctcgcagatgcgctgcacctcgcgctcctgctgctcctgcgccttcttgctgacctcgagggcatgagccagcgcctcgttctgctggcgctctcgagccgcgcgctgccgctcgctgatcttcttggagtgggcttcctccagcatgcgctcggccgagagctgcgcggcgaagttggtgcggcgccgcgacgccacgttggcgtccgactggttctgcatggcctgcaactggttgccctgcgcgaacttgtgcagcgccgagtgctccatctcctgccgccggcgctcgagctggatcttctccacattgcgcgtcgtcatgcgcgtgttcaccgggtacgggaacgccatggccgccgcgagctccagcagagctcaagaggaatcgctagtggagctcgtcggtggtttcagggcccaagtgacttccgttacgacacttcgtctcataataggcgtgaactcgcggggtcaggaaagcgtatctctgcagtcgtgtgctgtacgcgtagggctagctccattgcttccaatgtgaagtgaaaattccgagattcgccctcacgagctccaagccaacgttacattagagaagacgacaacctgggaccgatggtccactcaagagctgctgctgtctgctacggcgggttcgagtgcttggtgggctcactgaccgagctggacgtggactgactccgccgcgtgctattcctgcgggacctccgcggactgcggtttggcggcatggacgcgctgtgctggtagtagacgatcgcggcggccgtgcggtccttgtccttcatggtctcctcctctttgttgtcggcgaagaagctgagcgtatacccgatcagcgtcagcatgcagccgagctgcgcgagcgctcgcacctggtgcaccgcgatgtcttgctctgcggtagcgacaacaagaacgaggttaattcaaggagaggagaggagagagaagacggaccgctgcatgaccgcttaccatagtcccagagcttcgtgtacacgtcgtccagccgcatcgtcgagctgcagtagttctccccaagcttcagagcaatgcactgcgccacaagcaccgcaaggtgaatgagcacgatccctacgcccaccaggcctctctcctcgttctgaaacctacctgcttaatggtgagatgtggcgcctccgagccgttgtagagcacgggcaggtacacgagcacgcacatggtgaagagcgccacgcacgacagctcgatgaggaagccgcgcttgacggcctgcagctcgcccagcttgatgcgcgagacgctgcgcgggccgtaccggtcggtgatgaacacgcccgcgtccatctcggagcgcttgaccaggaagatgcggtagttcaggtacgtctgcccccagcagcaagcaacaccacacacccacaagagtcagcaactctgcagctatagctcacccccccccccccatttaggctaggccgtacgttggtgaacatggccaccgcctcgcagagcaggaacccgaaggccgcgttgttgtgcagcgtcggcgacgcgttgaaggacgcgaagaccggcaagccgaaggcccccacgacgccgaagaggcagcccatgtacgacagcgagcacacgagccgcgagacctgtccgttgtccaggctctgctgcaggaagcgctgcttgtactcgtggttgaagctccacgtgagccccagcagcacggccacgatgttgagcccgaagaagagcacgtacgagcctggcgggtctgcgtgggggtgacggttagcagcctggaggttatcacaagctgttgggccaggagtacagtaccgcgtccgagatccgagacgaacggccatgccagcccgcccacgtagacgcggtcggctctgcagatggcgaacgcgatgagcaccgtcagcagcgccgtggcggccgtcgccagcgcggcgaaggcccgcaagcggctcatggagatccgatccggcgtttgcgccaaaggctgcctgtatttaggtgcagctgcgcgagaaccttctgcaaaataaagcgctcggctctacgtgcaccctactactcgactggaaccaggccatgtctccatgcgagcttccctgcgtcatgaagctgctatgtgctgtgaccgactttgtcttctgcacgaacaccttgatgttcgtgcagaagacaaagtcggccagggcacatcaaaaggtaagagcttctaaaggctcactattcatacactctcaactggcgtgatggtggtttgcaggttgtggttgttgacgacgtagtggcaacgacagcttctgccaacccgtcaatgaaagggctgacgaactccatggagaacatgacgtggcacttctcggcgagcgaaagtaagagttttttgtgctatcgagtgcggcaagtatcgagtgcggcaagaccagaaagaggccttccaagagattgatcgcaagtgggtcaaagagcagctcgagcggaccacgccagcggcacagctgtcagcggccatggctagtgagagcccgacgacagaggagatgcagcaactgcctctggacatgcagcgtgttcgcgagttcatggtcgagacgggcaacgcggttgacgcggagctgcgcgctgatcaagccaaagagaccaagagaaggaactacatcgagctcacgagcgctcgtcgctgtgtcgattgcagggcagatcggaaaagggcgtcaggtacgacgcacgcagcgagaagaacaagaccaagtaccacgagagcaagaaccccaaggtgtgccgggcctgcaagggctggaagcctcctgacaagcacctggtgtgcgcggcatgtcgagcgaagaacgtagcggacagaagggaagtggtgagctcgcaagcgcccggcatgtgctacgtgtgctgcaaggaaccctgcgcggtcaagccgaacgggaaggcctgtatgcctgctgtaaggagtgccacaagaaaaaaatggactgtcagcggaagcacgcagccgagcgtgtcgccaagagcttgagcgcaggtcgtcggtgtcgggcagaactgcaaaagaaacatgtaaccttcgagggtggatggtcaagtgcagttcgtcccgatgttgcgttgaacggcacgctggcgctagctggagagtgttatactgtagatcactttgccacagaactcgcggcagcgacacctccgcttcatgcagaaccggaagctcattacgaaattttcgttcaagtctgcgtgcattcacgcacttccgctttcgccgccttccccgcaagccaacatgcagtccagccgtgctccacaccaaggcctacaagccccaccccagctcagccaagctcaagagcaagagctatgccgccagcgtgacgcggagcccgagtggagcctgatcaggctgacggggtgggctcttttcgagttcgatgtcgacatcgacaccgccttcgtcaacgccgtcgtggagcgacacgctgaggctcagcgggcggccagggctgcgcgtgacatcgaggaggaggagatggagagtttcaagcacgcgctcaaggcggagatcgcggccgacttcgagcagctcaggatccgactcgagtgcttggactgcggtgtgaaggacgacctgacggaggaaatgctcgaggctgtgaaggacacggaggagcgcctgactaccaggttcaagacggagttggacgcattcttatacacctttgacgggtacgtgcacgagcgctgcagcaagttggaggccaaggtcgacgcgaacgcggctgagctggagaagatgaagaagtatctggaccaggtccacgccgcgctggttggcgctcaaggatcgctcaataacgtcatggaaaccgtgatggccaacgcaacgaccgggaggtcccggaacgagacggtgaccgacaaaccatcctcgctaccaccggctcaagcggtgcctgtggagtcgcaggaccgccgcgccaacgcgaaccaccggcgacaacgacaccctccgcagcagcgcagacacccccgcaccagcagcaataccccccagcagtgacactccatgaattgacacgtagcttggggcgaatgctgatgcagtgcgtatccagtgtcactcagtgagtcgttagccgtacggaatcgacatgcacgcagtagtattattttttccttaaataatattaatgcctttgtcagcaggtcatctaggcgtctactgcatttagacacaagctcgttgacgaaccaatcgacatgaacgaactgcttcgtactgtgtccacgctgatgctttcgtaggcaggcacacatgctacttttcgatcactctttgaaggcacaagtacacgtatgcttacgacttcactctcacgacgcaagagtcgacactcgcgtgaagtttgcctgcaattgaactactacatcaacggggtctggcggctcacgcagaggtgcttgggaaaactcattccttggactcgcaagccaccccgctaagatccctggaagtgaacctgcgctcgctggcgttcacactaaccaggcgctgagtagtattcagctctccccacgacccaagcgaaactgcgaagcttttggaggatgtacgaagggaaaataaaaaacaaaaactgaagtctgcatgaatcgatagttttcaagtaaaatttccgaggcgctctggttttccgtagggacctcgagtatatgcgctactgtagacctctcagaaggatagctgcagcggcaagtggttgactttgtgaagcatagttgcatttagctcttacgtaattaagatctatcgagctttgacttcacatcgattcgacatcgagtgtgtatatacggcaacatgattaacgcggacactgcacttaacactgcacattgctcggctcgcccgtgcagttgccaatgttggtggtgttcaccgcgatgttggtgaaggtccagtccgacaccacgtccgggttcgtgaaaatgttgtacaggttcgtggccgtgccgaagaggccgtcgaccttgatgttagtgatcttgaccaagctggacgggatgcgcgagtacccgcccttggtcttgttgtagtccgagcgcatgacgatggcgtgcttgacgttcaccagcttgttgttcgtgtacgtgacgttggtgaccagccccttcatgccgatgatcgtcttgatgcgtatgccgttgtcgttgttgacgatcgtgttgtccttgaccaggagaccggacacagtgctgttgatgttctcctccttggcccccagagagccgatggagatgccgtggccgccgctgcagtagttctcgctgaagatcgtgttgctgctcgactgcatggcgaggcagtcgtcctggttgtacacgcggttccgggtgatggtgacgtggttgttcctgctcaggtcgaagccgtccgtgttcttggccgagccgttgccggcgcgggagtcgatggtcaggccggagatagtcgtgtagttcgagctgaggatgctgaaggtgcggaacggcatgttcttgatggtgaagcccgacagcgtcgagttgaccacctggctgaggcggaagaacacggggcgcgtgatgttctggccctgcggccagtaccactggccttgaccctccagcgtgccggggccggtgaccgtgaggtctttacccttcagcttgataagaggaccttcccatttctacataggtggcagcagcacgatcaagttagaattggaacgataaatctcttcatgagttgaatgcaggacccgtcgtaccttggggccgaaagtcgtggttccctggaacttgatgttggtgccggccgtgacgttggtgaggtccagcatcacgccagcaggcaccgacagcgagtcgatgaggatgctgctgcagtgcgtgacgttcgtgcccgcaacgtaggtgccggtcagcgtgcacgatgagtcatccagcgctgagttatcctgctgcgtaggtccgttctgctcggcctggttggcttggctggcgtcgttctgctccgcctggttagcctgactggcaccattttgctcggcctggttggcctgactggcaccgttctgctgcgtctggtcgttttggttggcctggctggcgtcgctctgctgcacttggtcgttctggttggcctggctggcgtcgttctgctccgtttggtccgcctggttggcatcgtcctgcttctcttggtcgtcgctctgctcctcctggtccacttgcttggcgtcgttctgctcctcttggtcctcttggttctgcgagccctggctgtagggggacacctgaccgacttggctggcctcagtctgcaggctgacttcgttctggttgatcaggtccaggccgtaggcggcggccacgaaaagggcgagcgcagccaaagtaggcgtgaagagcttcatggctgctgttgtcgcttgctggaggctgtgtaagcaggaggaggcgagtttaggaatgagtcccggatgagagcctgtgaagtgagcccgacacagtgccataggtacaaaaaggcagatgcacaacattacccagcagatcattgattatttctcggtggtagcatgcaactgtataaaacggttgtactgtcgcagttgtggacagtctggggaagacaatctggaccaacgtcactcgcctgctttccgcatggtggcagtgttgcacagcaaatcgtgctaaatttgtggcctggaaatcactggagatgaggaccaattcttgaagcagcgctgtccgactcggacactgagaacacgcccgccacaagtcgttaatacatgagtcaagccttcatgtggtcttgtgaaccaaagacttctgactggggtccttcgtggatgcgcgttgtgctggatgacgcgttgctttgtcatcgaataaatcaacgtaagaactataaaattaagctaaatcaactcttgcagattttattcaaagattaatctgaggatgtgactccggattttacagcggaattacattgcaatacacagattgagtgaacagctcttgacgaacataaacgtattgcatttgtgcatgccgagcaaacatatgagccctctgacgtacacagtctttccgggagggggtgaaagagggccaacggaggtgagcggttgcgagatcttttatcgcaggagcgcagcgactgcctttgcggagcggagcggagcaaagtacccccgctgggtttcatccgtcctgcaccagatcgtcacgttgtagggtgatgggcttctaagctttgtagtaatattagccaaatcagactgtgtacgtagcctctttcccctaaacttacctcaacacgacgaccttcacttggtctcgtgtcgggacgacgagagcgactccttttcacagactgaatagatcatctgccaaattgtcatgattcaaaaggttttacatctacacaactgtagcgctgttttagtataaaaatacttcaaaatatggtcaacctcgatacggaagtgtgagctctcacccctgatgataaaggaagtccctggaagcatagtgctcgcactaacactaacagcatagttaacattagtggctaatatgtttgcagagtaagacgcttttttacttcgaagtacgttttttgtattttaatttattataataacccttcattttgaagctctttttagttgccgaaagcttactggaacagaagtccttcttccctacaccaacaggtatcttcataactaaaaattattcatataacttaccagattactctggctacgccgtggtgcgcacgtgaaatatggattcgagaacctgtatcacttcgctggacttgccattaaactgaacgctagtgatagagcagcaaatatacaaacgcgtttacaatgaattagtgcaatgagaaaaccaattacatgtttacgtactacactgtttatacattgatctgcgtgaatgtgtgcatataattgtcgcgagtcaaatgggtcgggcacggtcgccgccgtgggtagcgaggcacgaacggttgaggaggattagacggacaaccagaagcagctaagcacggttcaatatgcaaagcgttctgacttgtttagacccaaagcaaattcgcgactgtccttactaacctggctcggagcgctcgctttgcgctctctcgctaagtccgctgccggcacgcttgccgacttcaactgctccatctcgcccttggctacactttatcccttcgtccttggctcgcatcggacgcttggcccgagccacgccgaccgccgtgacatccgtcctgctcctcacgtcggcgcgcgttcggcgcatgcgccactgcttccatggcggctgggcacgccgcgggccaccagttagcctgctcgtaccgaatgagatctgacacagcagcacccagttgcgatgactgctcgtctcgcccccgttcgcccagttgttctctcccatgaaggtcgcatatgggacggggcgccgaggccaacggccccaaccgttcacaactcggtcggccaccgttccaccgttctcactcgtgacatcctccccgaccaaaacctcgacgtcctcgtcgagctgtccaaacgcccatgtcttcttatcgtcacgagacgctcgagtcacagcccatcactctcaccgcagttcacccgtagccaccggtaacaccaccacacacgcctagagacgccgtccgcgagtaccatgacgctcaccaatccgcacagcgttgctcgatacaatctctgcagcgatcaccaaacttccaactcagtcaaacactgtaatagggacgcttcctccaccgttgtcttccttctgctcactccttgcgtccctcttcaatttcaaattcaaacacgcagaccgtttttttcaccgttccgttcgtgagttcttgccagcagttcaccgtccgctctccaccgttcttcggtgctgaaacgctccctccatcgactctgcttccgcttcagcaggtcgtcattcaccccttcatgcccttcgaccgtagctatttgccctgtccagctcgctcgctcacagcaatacaacttctcgctctcaagatcttctgcacaagcgacgtcacagtagaccgattcttcaccgcaccgtgcgatcgtacactcctcctggacaccggcgcttcacacggttgaccgtgccctccaactcgcttcgctgtggagcgcgaccaggcagcgctccctgaccaaagccattgaacactctcgagacatagtcctccgggcgtcgagtccctgctgacacgcaaactcaagccgtatagaccgatcacttcatcgcagcctcactgttgaaccgttcgccttcgaccgtcgttgtttttcacccggaagtgaagcaccgttcagaatgaccgtcaacggacctccctcgtagtcactgctcgccgaccgtacaaaccgcatccgtcgttcaaatgaaagctcttcgacggtacaaaccccatcgcttgaccgtactggtcacgcctcgaccgtctcaacttcatcgctcgaccgtctcaacttcatcactcgaccgtctcaacttcatcgctcgaccgtactgaccgctccccgaccgggactgaagcacacctcactctgattacaccggatcacgctctgagacgtttctagtcgataacacagcctcacaaccgagtcgcaccaggcccttggaccttgaccacaccgaactaccatgctcgcaccggtttgtctctctcaagaggcaccgcgcaccagctctcgatcactgggatcgcctcaacctgaacccaaccgtccttgctcaagcaattcaccaactcgcaaccgtagaccagttcagaactccttcctgctattactccatgatccccactgatgaccgtcttgcttcccaaaggcacaaagttcaccatagcccatttctcgtcgtcttttgtgaaataaaatgcgggcttggcgtcaccgacaagtaacgttactggcgaattatttaaagtttgaaaaatcatttggtgtttcatgacttacgcgcagggattgacagtaacacgattttcttctgaattaccatagtaatatactagtggaagataacaggatactaaagtactagtatcatcgagcccgatatctcgactactatattattattaatacattattatctattacttcatagtaatttcgatggtcgacacacaaggtcggattcttcgggcataaattttcttttacgagcatcagttcaatcttgttttcagagctgacgtggggatcgtggggtcggtcgaaccgctgccaaattgtcagtggcaatccgcagctcaagcttgttggtccccgttactagagccgacgattggatcgtgtactcgtacagcttgtataacgggatgctcctgctctaagtaaaaaccaacacctgaagtcactttagatccgtttaatcgattcatatttgctccccgtacaaaccgtgtaagacggggatcatttattcgaggcgataatgagtacgcgccgccaataaccaggtagatagcgttcttgagccattcagtaggtcgaggctatgtagctgtaggcgggaccgacacgagcaaagccggtctggccgccaaatgttttgctcgtgttacaattttgtgtacgacagtggccccggacgtcaaaatatttccctctgcactaaatcgacgagagtgggcatgcggccagacatccctggaagcggaaagattgccacacgcctctaaatttcttctagtgggaggcagtagtcagtattagtaaatgtggccgatctgagttactaattactgcagtggtattagttggctcctcgtcccaaaataatagctactatagtatttagagcatcattttaatagtggtatcagcggaatagtagttcaagacaaattactgtaactgcagccttgtgctgttagttgagacagtcctcgcttcaagcattttacatgtaaggcccagtcttgtatctagcgggatgggaccaatcagagctctttgttgcgggtcgaagcgggacgctttagggacgacaccccctcttgtcccgctgggatgttgtgtggcgcgggccgcgggatacataaaattgaaaggcaaatgtatcggactgcatctctaacacactgccagagtgccggaggtcctggcaataaccgaactcgtcccaatctcttcccgcgattgcggggagatataagactgggcctaagtgtcgagctgttgctatccttttgagcctctggaaaaacttatagccactaatttacgtgtactgtagcacgatttgccgtaggccatgtggaaagcaggcgagtggcgctagctcgaacacatgaaggttactggcagaggatttccgctgttcattgaacgacgacgaccaatgagttttgagtcagggagggagatcggtgatgtgtttgttgaagcatgaattcattgaatacagcggcgttacatggtctcccaatggtgtatgttctcaaggttacccgtctcattctccaacttgctcccaagtgaacacaccaagacctctcgatgaagatcttcacgcactctttcactgtcctcgcccttctcgttgctgccaccaacgggttggacttggttacccagaacgacgtaacccaggagtcccaggcaagtcaagtcggccaggtgtccccctacagccaggccgcgaagactcgccgaaccaggcgaaccccgtgcagcagagcggcgctagccaggctgctgacagctcgccgaagcagtcaggtcacgtgcaggaagactcttgcactctgaccggcaactacatccaaggaacaaacgtctcgcactgcgaaactattgtgatcgattcgctgtcggtgcctgctggcgtcacactcgacctgaccaacgtgaccactggcgctcacatcaagttcaagggaaccaccaaaagatagggagattttttctcctcagatttatgacgttttctaactcgaagtgatgcttcttgttctgttatagctgtggggtggtccgctcctaaagctgaagggtaccagcctctccgtcactggtcccggtacgctggacggccaaggcgtctggtactggcctcagggccagaaggtcaccaagccggtcttcttcaagctgaacagggttagcaactcgactctctccggttttaccatcaagaactcgcccttccgtacgttcagcatcggcaactcgaactacacgacgctcacccgtctcaccctgaactctacggctggcaacggtgtcgccaagaacacggacggcttcgatttgagccgaaacgaccacatcacgatcacgggcaataagatcttcaaccaggacgactgcctcgctatgcagtgcagcaccaacacgctcttcagccgaaactactgtagcggtggccatggcatttccatcgggtcgcttggtggcgacaaggtggacgactctgacactgttaccggtctcttggtgaaggacaacactatcgtcaacagcgataacggtatccgtatcaagaccatcacaggcttgaccggattggtcaaggatattgcctaccttaacaacaaggttgtcaacgtcgagaacgccatcggactacaacagaaccaagggcgggtactcgggcgtccccgacagtatggcgaacataaccaacatcaagacccagggtctctccggttctgccatgagcctctacgacatcgtggcgaacccggacgctgtgtccaactggtccttcaccaaaatcgtggtgaatgccacaaaccgtggaaactgcacgggcgagccgatcaccgtgaagtgctaactgcgacgcgttcgttcgtcggagaccaagcacgggtcaacagtgtgcttgtgccgtatatcaaataaatgttcttgcctaattggcgtctacaccgcttattacaatatagaggcaaccaacggcggagagacgcgcaagcagggattgccagggatgggtagcaaaaaaccaatccgattcgattgattggatcgagacggatcgtgatcgcatttaatcggattggctgatttgtagatcaatcggattggatcggatcgagtcgacaaagaagcatcgacatagctgacgaaacacggactcattggttaaaattggggtgatattgcccctcgcagatgtgatgctatcaatagtcgatatcacaaaacaaaaacgaagaggcctcccgcttctcgccacacttgcgactggccctcgcaagttgcgaggccggcaacacccagaagggcgttgaggtgttccaatgccccaaggcgaccaacatctgcaaagaaccccgagccgatgctggacggcatgtcgctgtacgacgcggcctgcagtttcaccaaccggaacggcacgccgcagcccattccgaccaacgccaatgccatcttctctcacggtctcatccacacaggttcgtgcgagttctgactcggcgacaagaagttgctgtacgccgacgattgctacagcgagtacagccacttgaacgtcaacgtcaagaccgagtcctccatcgactacttgtgcgagaacggcggttgcaagatgatgcgcgcttctgctcgatcggctgtcagacgcttgacgacacgaagaccgtgtggcagacttacagtacgttggttgccactttgtgtatgtggtggtgtgtgtgtgaatagctgagctaacgggcttttgtgtcgctgaatgcgctctactggcgagccagccttgcgctgcggattgcgtcattgctggtcaagtgaaagcgtcacgctttaacgtgccgccttcgagcaggttctggacaagcttaactgcaacatgtgagaaccagcgttgcagctcgtgcaacagtcgattctcggtgggcgtagcaatgcgcgagcgagatccgctacccgccacagctccgacggccaagacgaccctgtacaaggtccgtgccaggggcaccgacgtctccgtccgcgtgccaatcacacgtcacggctccacgaaccaggcgcttgcgctcaagtgcatgcccaaggctctgatcgttgagaactacctgcagaagaacgtcatctacgagaagggcatcatcgccgagtgcgaccgcccgattaccttcaagctgcgcgagatgtaccaggaagccaaccaagcaagtggaaaagtcacctcagccattggcattgtccgcagaggagacaggtgggtcgtataggaggatctcgaggagctgtaggaatgttttgcttccaaagtgcagttttgtcaatcaatggatatcattacgttctcgtttcagaaaaaaaagtttgtaaagtggttgcaagtctgcacagaagcgatttggcctgttgttcgggattcttgtgttaagcctttcgtaggcgtgctgggcacgaatgacgcaggtgtatggaagttgacaaaaatgtcatcagttttggtatgttgcagaggaatatagatgatggcttttacattgcggagagtgcgctgattgtgcggaagccagtaaaattggaaatggagggatcaagaataattgaagaaactgggcgcgttcgagttgcaagcaaacgcatttgtgtactctcagagcacgctacgataacaatttgcgactcagtggactcgggacaacctcgagacttgcatgtgctttgaatagggctggtcaagcgcaagaccttgccactaattgattaacgacacgaaaaccagtcgactcgagtcgacaagacatgaattcgctgatatcgcgaagcaaatacgctcattttcgtgagcacaacccggcttgaagctgcaaattccgtggtcaaaagtccaacgcgagagtttacggttcgaaattatcgcatcgccaccacaaacaaacataatcaccaggagatagccgtatagttcgccaataaccagaaaacaatacaagattttcaaaatctaatgcagctgatgcaaatacagacaaactggaagccacaaaataccaagcaccagctacccggttctctctgttgctgggaaatcctacaggtaatgatgaccgccataaattaattgtctttgctcgcaagaaatagctcgcagtctcagcgaggaaccactacctaatcgccccactgctcgttttccgcgattttccactttcagcttgttgagacggcgacccgctcatattcgccctgaaacacgttgagggcaccatcacttcgacatcaccgaaagaattgagttgtcgtgctctgctgcgtacttgacattcaatacggcgtcaatgtgccggtatcgatgaagtcgtaggacatgcgcaagattgtcatttctagcgacgcaaccaacgtgcagtcgcttaaaatttgcatttcgcgtcgccacaccctcctgcgtcactacatttcgcacgaaacaacagccagataggctttgagtccgacaaccgcatttcggtagcgatatctgcgttgaaaacattgttaacctgcctggataagcagacatgtttgacaacagtggccccgccactttgaaatcgcacacaatcgggaacagttccgcctcgtttcccctagtcgttgcccctcttcagtcgcaaaattatcaggcaacgctccgcctctgcggagactctcgagcagcgcttcgcatccctgattcagaccccatggagtgataaattggagctgcgcttcgcctcgtttcgattggagatacacaccttcgaaccacttcaaattgcggcagcacttcgcctcgttgcgtcgggtgtccaggtgctaaattatcggacagcgcttcacctcgttgcgattgagcaattggagatggctcctccttgtttcgttagagtgaccgcctcacagaagttgtggtggtttgagcagcgcttcgcctcgttttccaaggcttcgagtgcggtgtaacttcacagcggcacgattatccgcttgtctctgtgcgccatgtgagcgagtgcatcataccacgcgatgtcgatacatgctcttcgagctcgtccaaggcggcgagccagacttcgtttgagatgattctgcgcaaaaatggtattgtgttcctagagtgcaacgcggttgctttacaaaagcttaccacatatcaagttgcagcagaagcgctatgtactcgtcattaatgcaacgagctcatcaaaggcgaattggatcgatagcattatgaacgattgcgactcttacagacttaaagccactgcgaccaccaacacactagctctcagtccaattaatgtctactggttcagtatggacatcacccgaggtaaggttgaaggcaagaaaatgctgcagctccatgatcgctgtaacagcatcgtcagcaagtcgagctcgtcgaggcgtaatcgtcgttccagatgcagagaatgcttcctcgctaggcaccgaagtagccatcacagctagtaatcgcgcgccatcatctgaattcgaggaaatgatgcagcttcgtgcttcatccagttgcacacagctcgactgcctgtcttcaggttcatggacttatccttgtggtcaagccagcgagacaactcacttgaaaatgactcaccgctgctgtttgcgtgctactcgtgccctatgtgctcatcaataaggctgtacagcgcgtcctcgtcttcagcttcttctttctgctgctgggttttctccgattgttttctacgcagttcattttgctcatatggggcccgatacacgcgttcatactccgcttcgactagttttttcacttgctcgacattgacgtcaatcttgacgaggaacgacttcgcacgagggtcgagaatggcagcaatttgagcatcatcggttttgacgaccgggatatactcgtcaagcttcttcttgaacgcgcgagcaaaatccttggtgtaccacgagagagcagtctccgccgtcttccccgcatgcttcaagacgagatggaagacaaccaacgctacaccaaaggttgggtagttcttgccagacatgagtgtagtcgcgcccttgatcggtctcaggaaagctatgagctcattaagatagccccaagtcgtgtccgggatgggagcagcgagacgatcgccagggcttattgaaaggcatttgtagccttcatgacggccacgaatccgtcgctgtaactcaccaatcgctagcttcagcgaacgagctgaagaaatcatcgttaaggtgctgttccaccgtgtcacaacgtcgagctccggcgatataaaggtcacattgagtgccgcacagacatcagtcagcgcctcaagtaacgacggcgactccgacagttttttcagtatgtcacggacgacaccaacactgtcatccatgattgggcatcgtttaagcccttctttgacagcaagttgaaaaacgtgggccagacatcgcacatgaacgaccttggcttgggattcggcagcttccgtaggccctggagtcgaggtggtacccgaagccgtccctgcaagctggtcgtagcccacaatctcctcctccagtgtttcgttgatctcatcaatcattgttccgttgttggcggcgttatccgtagtgatcgcccatagttttgcaaaaggagatccgctcatcgctcgaatggtatcgatcagatgctgtgcgatgcggggaccagaatggggatactccacgcgcgtaaacccgatcataaccgacttaatgacccactcgtcgttgatccaatgcatggtcacaaccatgtagcctcgttttgccggtgatgtccataagtccgtcgtggcggatacccggccgtttttaacatcttgaagaatgctatgccgcgacagctccttttcgcacctccagcgcgccatgatcttctttcgaaccgtcttccttgtcggaggcacgtagtcagggtgaagtgttctgcagaaggaacgaaattcctttttctccaccagactcagggaaagcgcgttcgctacgatcaagaccaccagctgcttgtcagcggccgccttgtcgaacgtgcgctgccgcacgtatcgctcgaacccaaacgcgagcaagtccgtctggcgggcgcctctcgtgtccgccggagacgcagcttcgtcgcctccgtactcttctccgtgctgtgtcgccgaacgttgtatgagccaccgtgttccagaccggagctgagtcggtggaacacagcaggcaggtgaaggtcccatcgttgttatcgcgaatgaaggtccagatgtcggagcgtcgattaccacgagctcgccttggttcactggaggatgaacttgcacttgaattgtcttggggctccatggaatgaaggtatgcggagaggtgcgttagtgcgagatggcaaaggcgaaactgcgaggaagattgctgcgcatgcactacttcgcaaggtccggcaggcctatgccgatctgatccgattaaatcggccgattcgatcgacaacttcaagcagacgcccaacgtgtgcacacctgattggaccaattgctttactgcgaatccgcgacgaatcaccgcccagtaatgaggtgcactgggattccgtaccggggctcaaaaggtagcggtggcgtgtccgttgtgcggaacgtaaactgcgtgagcacccggtcacacgctggaacgatttcgcgcagctgtagtgcgtgcccagcagtagcagtagcagtagcaacagcagcagctgcggcgatgcgtgggaggcgcctaccgagtttcagtcgcgtaacgtgagctggtggaaggctgtggaggtggtgttggcgccgcacaccgccgaggcgcagattcggctgtcgctgagcggattaaatgtggtggtcgagttggtggacaacaagtagaactacgagatctgtgccaatgataccgatgttgtctcaggtccacatgcgattaagtctcaggccgatttcagcgcgaatctagcgcacttcaagtcactgtaatagataacaccagcactatcgtgagcagactaaagccacacatgaacttttgctgtgaagcgtcggttgtacggatgtctgtggtattttatagtttcggacatgataaaatgtataggagattagagtggaaacatgctattggtcatttcagtggtcgcttaaaaattattcatgtagtgaatgcgatatctagagaagcattttctggaggtattactgctgtattttatatcttggttgtcggattggatcgaccgatcaatcggatctaatcgaaatgaatcgagaatcggcactggctaatccgatcggtcagaaagtacatctcgatcaatccgattgggtcgattacccacccctagctgcagtacatgtattgtggctttcatccgttttggcaaatcgggtggtccaagatccgatatatcgggcccgatttgctggagggctccgatttagcaggaggggctgagggaagcaaactatatctggcccgatttgcgtctgggggctgcgagttgcgaagcaggggccagaaatgccgctttccgccggcaaaagggaccgccgcgaaaacatgtctggggtcctctcagatcggcgtggcacgaggtagtagcgtccgtagatgatcacacaggtgatttagctggccatagtgctacgaagtagctatatacagtgtactattgtccccaatgtcttgcagttctaatgcgtcatgagaggtgaggagaacttggaatgcctcccctctgagccttatgctactaactcaggtcagatatagctaaattggactaatcgatcatgtaggagctccagtttatataaatcagactccgagataacacgacaaatcgggcggcaaaatagttgaaagccacaatacatgtattaatatatgtatcgccgcggaagctgagttcgcttgccaacgtgatcgcaacggctgcgttcttcagcatgcaccgcgcgcctttaatgttatggaaggtattacaccttttgtaccttctcaacggagctttggctcgagcgtgagcaccttgcggacaccttttgactgctgtagatccgtcgccgcgaacgatctgaatgttatgcttacgccttcacagccgctgaatttccgtgtgcctggcggtcatatgggagctccatgagcaactttacgatttgaaacacacattcgaaccttgaccaggacgtcatcacggatttgctacccccgtgcacacgtctcagcaacgccaccacttggcgcgggatcgtgctacggtatgtaaagggctaatcttgttgtggtggactcgtgatgcacgtgtatgtatttgtgtcggcaatcgcccgctgctgcattggcacttcagattgtggaacctgtagtacagtagttggcaagatccggtacagtagtaaaatcacttacatgtatgttagtcaaacaagctgacaacgaaagtgcgcgttatttctaaggggccaaacaacccaatcaaatcaatctccaagtgcacaagcgcacatcggcaacaacaacacagcctgtcctgctttggacgtgtacagtgcagtacagaccacgagccaggtagactgccaataaactccccttacttgcattttctgatatccaacagagctgcgttaaaacgatgacaaagtggcgctgggctagagattttcgttcgtgatcgtccaaagctgtggcagctgctttcactgtggtccaatctagacctttccatttcaacaacattgaccacgtacacgcgactttcaaatgcattattaagaccgagtttgattgccatagtgttgtgccagtgtactgtattcctgtttatacatcttgtttattcacacgttaaggttgaaacaagataagtcctagaaaatatgacaaaacccaacacgcctgcaataatattctatcttccatcaggtggacagttttcccgcgaccgcgtcgattcgagcacaaatgtctattcatcaaaaaggctctacagcagctactttcttcgtagccgcgacaactatcgagacactcatatggacaattcaaaaagacacaatgaacgtcaacccagcctgccgactgttccattgcaggctaaacaggtcttgctcatgcacaaggtgtaggcttccgcaccgatgcacggccgcaaccgggaaccgaataccgcgggcgatacgcctagcacgtgatggagctgggctggccgctacacgagcccttgctggacgcgctcaccgtgacgcccgagaacgcccagcccgacaccgccttggggtttgccacgatgtcgtacaggttggtggccgtgcccgacagacccgagatggtcacgccctggatggacacgtcgctggtggccgagcccgtgtagccgcccttggacttgctgtagtccgagtggatgacgatggcgttcttgacgttggtgagcttgttgttggtgtacttggcgttggacacgaggcccttgaggccgatgatggtcttgatgcggatgccgttgacgctgttgacgatggtgttgccgctgaccgtgagccccgagaccgtgtcggactggtcgacggcgtctccgccgagcgagccgatggagacgccgtggccgccgctgcagtagttgttgctgaagaccgtgttggtgctcgactgcatggcgaggcagtcgtcctggttgtagatcttgttgcccgtgatggtgacgccgtcgttcctgctgaggtcaaagccgtccgtgttcttggccgtgccgtcgcctgcgctcgagtcgagcgtgaggccgctgatcgtcacctgctggttgtcgacaaggctgaaggtgcggaagggcgagttcttgatcgtgaagcccgagagcgtcgagctcgtgacaccgtgcaggcggaagaaaaccggacggctgatggacgtgccctgcttccagtaccagtctccctggccgtcgagcgtgccggagcccttgacggtcaggtcgctcccgctgagcagcacgagcggaccctcccgctgagcagcacgagcggaccctcccacgtcttggtgccgaaggtggtggtgcccgtgaactcgatggtggcgccgctcttggttttggtcaggtcaagcgtgacgccggcagggaccgtcaacgatccgatggtgacggagctgcaggaggagatgtcggtgccggccttgtaggtgccggtaaggttgcaggcgctgccgccgccactgctgggtttggtggtcgtgcccgagttgttcgagctcccgctgccgccagtggtggcggtgctgctaccactggtactgggttgttgttgctgctgctgttgagagccgctctgggactgatggtggtggtgactggtcttagtgctgctgcttccactgccgctgggctgctgctgctgctgctgttgttgttggtcttgatcctgctgctgagggtcttgttgggactggtggtggttgcttttgccttcggcttccatgcgcagcatgggcgagccgtcgacagtggcggcgaagagcgcaatggcagcaagtacggtggggaggagcttcatggtaactggagcgtcgggagactggaggctgcggggctgcgtcggtgattgagtcagaagtgttcaggccgatgcaaattgcggaatgaactctgtcgtgaagacccatgtatttgccggcagtggagacagccaacactgtctcggatctgcgaccatcggcttccttgtgttcgcgagggcatctgtcgttcggacagcgctaaagcgcaccatagagttgccaatagacgccggcggtttgttgaagcgagcgtcacccggcacaactcgatcctgtggagtgaccgctggccggcgttagcgagtcgtacagtattgccgagctggtagaccggttcaggctggcgtcggcgctcgttcgtgcgttgcagcaatggttgcttctaaacatatgctaacgtagaggtgatctcgaatagtggcatacgaaattgcaggaagtgcgtctgcattttttttcgcgcttcggggcgctgattgctgaaggtcgtcattttgtggtggggcggagccatatttcgctggcacatgttgacgaggtttgttgaagatgaagcacacgcctctaggttccgagcgcccggcacattcgttcgtttagaagtccgtgcgtggcgtctgaatcgcgagtacaagtgtacatgtaaacttatgcgggcgacatggctattgctgtttgtcgtcatgcaggattcttcccaagcagatgagtttagtgaagtgacgccagaggcactcgatccagccaaacattgggactaagcttagatgaactaccaacaagtgctaccattgttggtgagacggtgcccgcgcgttgacatcaagctattcctaccatgcgcagcctgaatattgatgccgtctatctttgaggcatcctgtagcgagtgaaggtagaacggctgctgccactagccattgcgcacgcaagttggagtttctgctataagtgctatggatacccgagaatctcgattcggactgtatttgaaggtacagcaattgctagtctaccgttaatctttcgacactttcgacactttcgacgaaggttcgcagttaatcgccattattttgcgatactgctcgactatgatactttgaagattaatcgccgtacttagtgccatacaggcaggtctgtattgtacgagaaccaatgcagatatttcgcagctaagcttagcgcttgaaaaagctatcgtacttttattatacgtgtacagctcgacagcaaaaagcgcttcctgcaatttcgtatgtcaatattcgagatcacctctacgttagcatatgtttagaagcaaccattgctgcaacgcacgaacgagcgccgacgccagcctgaaccggtctaccagctcggcaatactgtacgactcgctaacgccggccagcggtcactccacaggatcgagttgtgccgggcgacgctcgcttcaacaaaccgccggcgtctattggcaactctatggtgcgctttagcgctgtccgaacgacagatgccctcgcgaacacaaggaagccgatggtcgcagatccgagacagtgttggctgtctccactgccggcaaatacatgggtcttcacgacagagttcattccgcaatttgcatcggcctgaacacttctgactcaatcaccgacgcagccccgcagcctccagtctcccgacgctccagttaccatgaagctcctccccaccgtacttgctgccattgcgctcttcgccgccactgtcgacggctcgcccatgctgcgcatggaagccgaaggcaaaagcaaccaccaccagtcccaacaagaccctcagcagcaggatcaagaccaacaacaacagcagcagcagcagcagcccagcggcagtggaagcagcagcactaagaccagtcaccaccaccatcagtcccagagcggctctcaacagcagcagcaacaacaacccagtaccagtggtagcagcaccgccaccactggcggcagcgggagctcgaacaactcgggcacgaccaccaaacccagcagtggcggcggcagcgcctgcaaccttaccggcacctacaaggccggcaccgacatctcctcctgcagctccgtcaccatcggatcgttgacggtccctgccggcgtcacgcttgacctgaccaaaaccaagagcggcgccaccatcgagttcacgggcaccaccaccttcggcaccaagacgtgggagggtccgctcgtgctgctcagcgggagggtccgctcgtgctgctcagcgggagcgacctgaccgtcaagggctccggcacgctcgacggccagggagactggtactggaagcagggcacgtccatcagccgtccggttttcttccgcctgcacggtgtcacgagctcgacgctctcgggcttcacgatcaagaactcgcccttccgcaccttcagccttgtcgacaaccagcaggtgacgatcagcggcctcacgctcgactcgagcgcaggcgacggcacggccaagaacacggacggctttgacctcagcaggaacgacggcgtcaccatcacgggcaacaagatctacaaccaggacgactgcctcgccatgcagtcgagcaccaacacggtcttcagcaacaactactgcagcggcggccacggcgtctccatcggctcgctcggcggagacgccgtcgaccagtccgacacggtctcggggctcacggtcagcggcaacaccatcgtcaacagcgtcaacggcatccgcatcaagaccatcatcggcctcaagggcctcgtgtccaacgccaagtacaccaacaacaagctcaccaacgtcaagaacgccatcgtcatccactcggactacagcaagtccaagggcggctacacgggctcggccaccagcgacgtgtccatccagggcgtgaccatctcgggtctgtcgggcacggccaccaacctgtacgacatcgtggcaaaccccaaggcggtgtcgggctgggcgttctcgggcgtcacggtgagcgcgtccagcaagggctcgtgtagcggccagcccagctccatcacgtgctaggcgtatcgcccgcggtattcggttcccggttgcggccgtgcatcggtgcggaagcctacaccttgtgcatgagcaagacctgtttagcctgcgatggaacagtcggcaggctgggttgacgttcattgtgtctttttgaattgtccatatgagtgtctcgatagatgtagccgctacgaccgggtattttagctgcttgtagaatccacttgatgaatagatggatgctttggattaatttgtattgttatatctttgtttctgggaaacgtacgtgtacagcagaggagtgaccatcctacaaggatatagcactgttcttgcaacttcagcatgtgagctgcctgccatttctatgcgaggcaccagctaaccaaatcgcagcatcactgtacactaacgctcgtattgggctgtcgattaacatttgttggtttgtagtttgtggttgagggggcaaattccgaagtgagattaaatgttatcgtctctcaatctactctctagtcttcccctcctgctttccttcttgttctccttgtgctcgttggtgcctctcatcagacggattactcccgggttccgattgacttgatctcagtatacttgggtctccctgaccagccactggtatatccagagcccggctgccgccggctctcccgtcgccgtcggatcctccgagtcatcggcggatgtgtccacacgttctcctcgtccatgtgcatgtattggcggcgctcccgaagactcatgaagaagattgagttgctctgtcggtgttaatcgacagagcaactcaattctgataccgatactatagctttgctcaaaccccaggctgtatttttttaatagatccggtatttgatgcagggagtgtccatctgtccatcttttgggggctaatgctattacaacttcaacggttttcgcacaggcgctctccaccagggtgctaaactcagtacttatgtggaagatttgagctaccccgtgacacaattgttggcctcacaaggtgccgtgaactaacgctaactacattaggaacgctcagtgggttatcacaacctcgaaacgtcttatttctgtaaggtggtccgtctgcgtaaggataatggtattacatcttcaacgttagtgcatcacaccagatcacctaacttattgtcgaggtaggtaattttgttgagtcccgttgatccggcaatgatcttgatgcggatatgtacgaacggtttttacttatttgcgtcgagcagtgagccaacgattggtcgacagtggtgacaccacctaatagcaagccaatcggccaaatctatcaccacggtactggtatcacattgtacttgtcaaaagaacagtttgttgacggcggttgacaaggtcgagcttccgacagcattatttggtttcaagtggcagtttaatgtggaggaatgaggtcatgaatcgaccgggcataagttaatgatcttcggaagaggcagactttatagcaccacctttggcaacttgtttgaactatgaccgcgactgctcagcagcgctctctactgtaagagtaacctatgagagatcataccacaagcgtttgcgtgttgatggtggcgtatgtttctagctaacccgatggcaggatagttttgagtcaactgcgtggatttcgttaggttgcaacgcagggttaccatcggacatcctatgagatgctaacgttagagccagcgagtttgcacatcttgcaatacactcgcgcctacaagcaggaagttatggcgttctcgacgtctgtagtaaaagcgcgccaggcgttgcgcgagtcgcgtcgcgcgactaccgctaggttgcgctaatctacatctatatgtcaccacgaccaacacgcgccttcattcggcaacttggattcatgctcattcataagacgatacttaaccccagaatgcctatcataagacaaagcgtcttacgttttccgatcaacgcgttttgactacatcttggttttagtataccagtggctacattgcatattgtctgtcaaaacataagacagtttgtcggacacttgtttgcgccatacaattggccaaaagtgttcatgtcacagcggcatcgttgccgcggacgcggtggcaacgttgagcgccgaaacgatgcagttgcatggtgcggtagggtaagtagcctcttgttcacacacgaagcgatgtgcctgtagttggccgctcgcagcaagcttaaatatcggcagaatgactgcacgaacgcgtgcatgcagtccgtggagctgttccactcagaggtgcagccgttgtagggcatggagttacgatgaagttggcagacgtaaactaagagggacaaatagctcgtaacggtactacatgtacattttaatgtagtaaattttatgcttgagcgtacatcatagtagttgtgaaggcgtggcagccagggaacggtgttgccagtgggcttcccgagatctttcaaccccctcttacctaatcattacagtccagcaacaaaatgcaaccacgtactctgcaacggcgataatacctagatcttatacctacgacgctgaggtgcggaggagctccacactgctgcgcgggcgctcggcgcgcgccatatcgctgctgggctcgaccttcggcatcggcgagttactcggtatctcctgcaactaagccactgcctgcagccatgctttttgtcgatgctacagcgtagactggtttgcgtatgcgcgttctatccgaatctccatcttctatgcagtgttagtactttactgtagaaaggagagttggcgtggtggggtgaacgacaacagtcgttcaccccagtaaagcgaagaaacattgctccactacgggaacaaacggtcgcatgataactgtgctatgatgtccttacattccattcctggcaagtatatttaaatcttctagcaggaggttagtgcatggcgtcaggatcaaaggcccggacatttcaaggggcatttttcaagtgcgctgcctctagtaaagggggggaaatgcgcacacagataaatcagtccaatttacgagccgagatgcagcaacactcgagactacataatacaatattaaccaatgaaattgctacatttgatttgtcgtcaaactgtcttacgaatgctcgacacaagtgagtgttgtttgcggcagacacctacagtattatcgttcatacttcgaaaggctatttgagcacaagccgtttgaggctgtgcgcgtcccagccgcgcaattcggagaaaacacttgttgcgcgtgaaagttgaccttgaggatcgcttcagaaatatcattttcaaggaaacgttgtatgctgccagagctgattggctgtgccagggcgggtctacgatccctgcgattttgctcgcttgtggcgtttggccaccgcttgaccaaccgcccgctgccgatggatacgaagtgtgtgcgatcgagccgcggcggccggcggcaacacgatccatcatctggtacgaccgagtggccctctcatagcactcggcgagtgctatgagagggctcccccgtttccttgatccggatcgaacaccgcagagaactaatgcccctggctcaagcctaacgtttactctgatccctaaagagccacccgtattgttgtactggtagctcgtatttgatgaagctcgaccatcgacttcagtttccaatttgcctccagtggagcaacaccaacaaccaacccgggcgctactaacgttagctacaagcaaccgcacgacgacaatgaagcttctccctaccgtgcttcctgccttcgcgctctttgccgtcaccgtcgacggatcatccatgctgcgcatggaggccgagggcaagaaacacaagcacatgaccgccgcgccggtcgcgcagactgataacaacaacgcccagagtcaggaccaggaccagtagcaagaccaaacccaacagcaagaccaaagccagcagcagacccaacagcagctgccggagtagcagtggcagccacgccggcagtgccgctgccggtgtcagctccaccacgacggcccctgctaccaacactggtagcggcagcaccaccaacgctggcactaccaccaaacccagcaccagtggcagttcgtgcaatctcaccggcacctacaaggccggcaccgacatctcctcctgcggcttcatcaccatcggctcgctgtccgttcctgccggtgtcacgctcgacctgagcaaggccaagaagggcgctaccatcgagtttgttggcaccaccaccttcggaacgcagaagtgggctggtccgcttgtgctactcggccgaagtgacctgactgtcaagggctccggtacgctggacggccaaggtgcctggtactggcagcagggccagtcgatcacgcgcccggtcttcttccgccttgaaaacgttgccaactcgcagctctcggacttcacgatcaagaactcgcccttccgcacctttagccttgtcgacaaccagcaggtgacggtcagcggcctcttacttgactctcgcgctggtgacggtcttgctaagaacacggacggctttgacctcagcaggaacgacggcgtcaccatcacgggcaacaagatctacaaccaggacgattgtctggccatgcagtcgagcaccaacacgatcttcagcaacaactactgctgcggtggccacggcgtctctatcggctcgctcggtggcaccgctgttaaccagggttccacggtgcagggcctgaccgtccagaacaataccatcgtcaatagcgacaacggcattcgcatcaagaccatcatcggtctcaagggcctcgtgtcggacgtcaagtacgtgcagaacaagctttcgaacgttaagaacgccatcgtcatgcactcggactacagcaaggccaagggcggctacacgggttcccccacgagccaggtgtcgatccagggcgtgaccatctcgggtctgacgggctcggccgctaacctgtacgatatctgtgcgaactcgaaggtggtctcggactggacgttctcgggaatcgaagtgagcgcgtccgtgacgggcaaggcgactggccagcccaatagcattgacgtgtagatctagatgctgtggtttctgctcttgtgtttagattggcgtcccagtggccgacgtgaaggtcttagagagtgtgtggggaccagtgccaaatcgataaatttgatgtaagcttgctcatgctttcgggaaattaacggagttcttttcgtgccgtttgaatactgttgcattttcatgcgttgacaagccaaaagaacgcctgcctctgttcttgatgaaaaagttcaagcaagttgaagttgcaatatatttgtatgatcagtcagatggacacttcttgcagaaaatgcctactagaacatgatattgcgtgagccttggcgtacatgtgcagaaggaacgaaatccactgttccctcctcacacactatggactgtacttcggatatgtgatgcaacaacggaacgtaaggccgagctcgaactgaacgtttttctactaaaatcatatacaacgagctttcaacctatgcagagtctcacttgcaactacttttggccctttatcacgttgtatcccagcgtactcattttaagcacgaccaagattgagtggagctatccgagcacgtcggtaccctcactacttactgaccgtaactagcaagcgtacagtagtggtataacaataagtttctagtacatcgaagtacttgctcaggcgcacgcacagagtggtgtgtggagttttggaccagtcaacggacacatcagactaaggacgacgccgacattgacagctcgaccgaaactacgtcaacactacatctacgtatcgccgccgcgtcaacggcgacaacgcataatcagcgtcagtgattggtgctgcggatgagtagtttccaccgcagtgcaacggaggtcggaaacgcgtttttcgggttcgacgtaaaagaaggccatgtacaacgacttcaacacacaagatcgcatcagggaacgagtccgacaagatgccaagctccttcccaaggacgacgagtccatgatgctgttaacggcctcctcgggcttgttttgtccgtcttgtcccagcgacctgaccaacggaagtctaaatctgggtgcacggttcaagcggtcgagagggtcgagtaggtgagctgcttcattcggtctttcgctcagcgctgagcgattcgaccatgtgcgctcgcaagtaggcgacgcagaattttaacccacccaccattcccgagggggtgcctcggcttgcttgcggttcaagccgcaccgatgctagccacattaactgaaaatgaagcagctctagccccacatggattcttgcacaagagtggaaagctggagggagctgccacagggcgccctctttgtaaggcaagtagtacagtagaaagagattttatttggctttgaccattaaaatcgtgatggtggtcttaagtttttttctgctacagctatctttttcgtgttcttgacggcgtctcgttctgttggtgatctctgattcacgcggggctcttatcgatactctggatacattagtaaggcaagtagctattgcagctgaatgacctcacttcacaacttacgcaacgtcatatggtgccaacgcgaacgttttgatagctcgacgtcgagacacgtacacgtacgacgacgtccaagtcttagaatgcatagaatcggcacaatcgcgacagcacggcgcgcgcgactacagtactgtaacaccgtttcacgtgtatcttacttagatcgaagcgttgtaggcggagaatgcagtacagggcctattattactgttgacagatccacacagccttaatacggtagcacacaacgcttagccatgcgacctatacagtacagtagtgggagagcttcctagcgttgcaagtattaatacatgtatctgcaaaagactgagtaaacaatgcggcgacgaccagataagtcgtgactgacacggccacaacgtgtatacatttcgctactacggcaagttcgtgccttgactgcgcgattcgaagaaaacacttgttgcccttacaaattgtcctccgttacgcgaacgacacggcgcgctggttcaacgccggcgctgacttgatacagtatgctcatgtgggctcgatcatggatcgcatggctcgaccaaatacatgtactgcacatgtggcagtggacacgatcgaccaccggtaacctgaccttgtttttggttcgagaggtgtcaaagagggtgcccgcttcgttgagccggagcccgcttcaggtcaaaacggcgtgccctggctcaactggacgcttaccctgtatttcaaggaggctccgtagtggaagcccgattcggtcaagctcgaccggtgatctcattttcaattttgcctccagcggagcaacagcagcacctgacacggccacacctgagctacaaagcccacgacgacgatgaagcttctctccgccgcgttcgctgccttcgcgctcctcgccacgaccgttaacggctcgcccatgctgcgcgagggcggaaagggtggcctcccgaagcagggccagcaacagcagggtagcagtagctcgtgcaacctcactggtacctacgagaagggcacggacgtctcgtcctgcagcgccattaccatcgggggactgacggtgcctgctggcgtcacgctcgacctgagcaatgtcaaggacggagccaccatcaccttcactggcaccgccacgttcggcacgcagaagtgggttggtcccctcgtgctgctgagcggcaacgacctcacggttaagggctccggcaccctcgatggccagggagcctggtactggaagcagggccagtcgatcacccgcccggtcttcttccgtctccagaacgtcgttggctcgacgctctcgggcttcacgctcaagaactcgcccttccgcaccttcagccttgtcacgaaccagcagacgacgatcagcggactcacgctcgactctcgcgatggcaacggcatcgccaagaacacggatggcttcgacctgaccaagaacgaccacatcacgatcacgggcaacaagatctacaaccaggacgactgtctggccatgcagtcgagcaccaacacgatcttcagcaacaactactgctgcggtggccacggcatctcgatcggctcgctcggcggcaactccgtggaccagtcctcgacggttcagggcctcactgtcgagggcaacacgattgaggacagcgacaacggtctccgtatcaagaccatcatcggaatgcagggcctcgtgtcggacgtcaagtacgtgcagaacacactgtcgaacgtcaagaacgccatcgtcatgcactcggactacagcaagtccaagggcggctacacgggctctcccactagctccgtggcgatccagggtgtgaccatctcgggtctgacgggttcggccaccaacctgtacgacatcgtggcgaacccgaagaccgtgtcgggctggtcgttctcgggcattaaggtgagcgcgtcggtcaagggcaaggtggctggtgcgcctaacagcgttgccgtgtagatgctctcgtttctagtagtgtgctaagattggcgtcccagtggccgacaggatggccgatagagtgctggggcatttgccaattcgataaattcgatggaagtttgtttttgtttttgaaattctattgcatatgcctcaaaagtgcagtgtccacatggtcttgtagctgttcgtacatgtacaggtaccacgttcgcggccaagacgcatgcgcttcgcttgcagcatggacagaagttgaagtaaacacctaggattctctggcagggaccatgcagcctgcgtggattacatacaaaaagttgaagtagtcaaatagacaactgtgatcatcatcatcaaaaaaagttgaagtgactggaatccccagaggaccgtacagtacggtacgagtgtggtgcaagagcaagagatgcagctggctgacagcgaagatcgctgaactgtggctatcttagcagcatgtctggtccacgtcggtcatatcgatagaacctgcgttgctgctggattaacgtatcttacccatgtcgccgctcgcgacttcagtcatgcgatgtacaacaattacgattcatgttctttcgtaagacgatacttagccccagagagcctaccgtaagacaaagcgtcttacgttttgcaatcaacgcattttggctacatcttggttttagtataccagtggctacattgtattttgtccgtcaaaacgtaagacagtttgtcggacaacaatttgcaccatgcgattggccaaaactttctgcacgaaagagggtagtgtcgttgcgtgcgttcctccgttgagcatgtaggaacccgaggacaaccgctttgccgtttttgaattgctcgtgccacctacagtcgagccgacgaaataaggcgctcacaagcacgaacatgtagtcggtagtgcggccctactgctgactacaatgtacacgcttgtttgagaatggttaagaaataaatgcacccgaaccattagcccagcttgacaaacaaaacgttcagggctttatagtgaattctagttaatgcataaccaaatagagcccctcttcctccggtagtgcggcccacgaaccctgtcgtgtcctctgaggacgcctccgagcgaaacaatgcacgacgagcgcgcacacatgctccgcaccgaggcgttgtcggaggacgcgagggagtaaacattcaatacattatgggatcttaccaaagccatgaaatgaactgttttgtagtagcaacaaggcagcgtcagccagtcttggtatttgtatttgttgcggcttgcttggctgccttactcccggaggcgcacactgctgcagctccacctacgtcggtagtggacacctccgacctcacccgcggccacgtgtaggcaagctgttggtggtgtcgcaaacgacgtgagggcctctaagagtcaaatgagcggcgaaacttctcgggaatacatgcaaaatgccaaagctaatgtaattgatcagcccggctgaaggcgcttaccagtttgctcggcttgctactgtagtagtaggaaatctaaacgatctaagctcgccgtggtgttttaaatatgtagagggagtttgttggtgtcgcagcgctcctccgcacagttctatcgaaccgccaatcattactaccactactatgctgcgcccgatattagtcaggatacgaagtgcaacgaaatgcatcaaaaagagtaacgcgggccttcctagcagagcctctgcgcctggcagtgccaacagaattggcaagtcgtactattcgccaatcaaatcactagatttgatttgtcgtcaaactgtcttacgaatgcttgacacaagtgattgctgtcttgatgcagcctggccaccgcccgagcgccgtacggtacatgtacatccatggtgctggtacaggatttccaagatactctttggtacagtactacaaatggatagcttacggtacctttgtggggcacacacgaagaatcgataaaacacaaggcctttacactgtgtgagcatctggtcctcgaccaaacgaaacgtgtgcaccatcaggttacccagaacctcacgtcaggagccaaatgtcagcaaaataagtgcacacttgtgcacttattttgctgacatttggcactgcacagacgacgccaaccttgcagatttgagcaggtcgtcgtgctctgtgagtcgcctctataataatagtccattgccaatgcgctggaggacaatggaccgttgtccaaacccagcgcgcttcactcagatccacacacccttttgacccgctaacatgagcaccagcttagacacccagatgatgtgaaatttagccggtacctgcaacctgtacttgtaatgtacagtgcggtacatagtagcatatcaatccgtacggtaccggcctgtattgtgtaccaattgcgctgcaatgcagagccctctgcggaatcctggcgggtgaatctggtgtgtacacgatgagcacgcgcggtttgacgacacgaaatgtgccgtgattaaaacctggcgaaagcggcgcgcacactacataatactggtacggcggtttatctactagactattgtacattgtaagtcttcgtttgctaaaattattcgatgaccagggcttggcacgggtgccacagttcttcttcgaaaggttagtcagttagcgttaagggcttttaagcccggtatcgtcgattctatgacccgctggcattgctgtacagccatgaaactgtagcggcagttccagctgcccccattcgatgagaacatgtgctgttgtaaaagccggtgtactgtacgccgtgcctgctgttgtctgcctaaactccagtgtgagctttgttttgccgctgccagctctgcgtttttgtccgatacagtaaagtacccgccagcatacagacaacgacttacaaagccggtagacacaaaaagccggcagacgaagtcaagcaaagcttaacacaagcaaaccatccaatcagattcaatcaaatgacttcatctttgtataccatctggttttgtgtactttatatgctttcttgtgtactttatgcagcacaccgtgtgttttatgacagtttaacagatttgacgggaaggaatttatcgttgtttttatataggaggatggcattaagcatgccggctttgtaagtcgttgtctgtagttcgaagcctcccgttccatacaaattcataaataaatcttgggcatcgattcgattaatgcatctcgatatttgattggttagtctctatattgattaaaatgcatatggtgcccgtcaagcatgcgtgcttgcttgcagtgctgaaccacagcccacatcgaactactactaagtaatggtttactctatgaactgaaggggcactcgaaacacagctcggtgcaggtggaccactgccctcagttttcattttgcgcgcacctgcaagaaacctccaatctccagtccaaggtttcacagcatgaagttcttcaccactgcgctcgccgtgtttgcgctcctcgctacgactgccaacggctcgcctatgctccgcatggaggccgaaggcaaaaagagcaagaccaagacaccggagccaattcttcagttggaagacccggaccaaacgcagcagcaagaccagaccgagcagcaagatcagactgagcagcaggacccaacccagcagcagtcgcccacgaccaagacgagcagcggctgccacctcacaggcacctataagaagggcaccaacatcgcgtcgtgcagctccatcgtggtggactcgctgactgtccccgccggtgtgacgctggacctgagcgcggccaaaaagggtgcggtcattgagttcgtgggcaccacgacgttcggcacgctcaagtgggagggtccactggtgcgcgtgagcggcagtgacctgacggtcaccggctccggcacgctggacggcaatggcgcctggtactggaagcagggtcagtcgatcacgcgccccgtgttcttcaagctgcagaacgtcatgagttcaacggtctcaaagttcaccatcaagaacatgccgttccgcacgttcagcattgtgacgtccaaggacacgaccctaaccggccttacgatcgacaaccgcgctggcaatggtatcgccaagaacacggacggctttggtctgaccaagaatgaccacatcacgatcaccggcaacaccatctacaaccaggacgactgcctcgctatgcagtccagtactaacacattcttcaccaacaaccgctgctacggcagccacggcatctcggtcggatcgcttggtggcaacactgttgaccagtctactacggttcagggcctcactgtcgagggcaacaccatcgtggacagcgacaacggtctccgcatcaagaccatcatcggtctcaagggtctcgttactgatgtcaagtacgtggacaacgagctttccaacgtgaaaaacgcaatcgtgatccgctcggactacagcaagcagaagggcggttacacgggctcccccacaagccaggttctgattaaggacgtgacggtctcgggcctcacgggttcggctaagaatctgtacgacatcatggcgaacccgaaggtggtgtctggctggtccttctcgggtatcgacgtgaccgcgtcggttaagggcaaactggctggcgcgcccaacagcctgagcgtgtaaaaacactggttcggtgttactagttggcgatcgcagcatgcctgagtctacatgcagctactacagtttaaaaaaaaaatcgttgtttgccctttgactacaagtacatgtaatacatgtactgtacgtaaaatttgacactccaacctgtaaggggctggtcgcgctggctggtgctggttctcggtcgggacggcaagcggtatgcgaaatgatatcgtattatttttgctcactttggacataaccatgacgattcgtcgaaaacccgggaactcgacccgcttgctggttcccgggttctctgcgaattgcaatggttatgtccaaaatgagcaaaaataatatagaagtgaaaactcgaggccgacttagtagttcacctaccccttcccatctctggaacacccgaccgagaaccagcaccagccagcgcgaccagcccctaagcggtcgctgccgaagtagatcgcgcttcgccgatctttcggtgctatttgagcggcgtcaaccccctgaaaactgactattcgctatcggggctgacgccatccatgcatgggcacactgtattaagcgtctggtgagttctgttgactacgctatgtgggcaagacccaacctggtggtctgctccgtcgtctcatgctcgtacccctccagcttcatctaggattcgctccaaagcgcgaaccctctttcccaccatagccttctccacagcagtatagtctcagcatcaagaccctcgtcgccatctccgccaccactgcatcgccgatgagacgccagccaaacaagccgtacagaagtaacattttatcgggtttatataccgccactgactcagtggcggcgtcggtgttttaagcaacgcgacaggcagcgcagctatcaacttctttggtgtcatgaagtccggcacatccatgggaggttcaggaacaactgaagctgcgcatctcaggcactctcaatggccaagacgcttgagcagggaatgaacatataacttccgtcgtcttctgcatgctcgagaccatctcttctaccgtatccggattagcgctgacgaacatcccgtccccctttgcacagtcaactctgaggataccacgagcagcagctcgaactacggcaagactctgacaaagaatatacttctgaagtacggaaggcttctacagcagttgagctgaaacgacggcctcgtgatcacgagcaacacctgggcgattacagtactcgccatgcggaatgctcacctgaacagagcaacaggattgtcggcaggtacaatgaccccgcgtactcgacgagtgtgggagaaggaacaacgagtacttaagtatgggatcgcggagggcgtcacgtacacgaactacatgatttcaagcgtgaaaactgtcatcgtgatccacagtaggttggagatggctccatggcgacgcaaatagcaagatacgatcccgatggcactcactcacttcaccaaactactcaattctaagcgcattcatgccaagcacactacaaccgtcttggcagcccatgacggcaattcgctcacgattcgaggactctatagtttctcgttaaacgtaaatagaggacctcttaacgctaaaaaaacgacggcaattggctcagtagtctacgttactcgacacaccgcaaaatgtgccgccgagccgttgacgcgagttattgagaacggtcacctagcgtctttgtcatagccatcatacaaaactcttgagtattgggacaaatcaactaacagcgcattctattgagcaaatacgcaatagtctgcaagcagaatctaattcggcgcctttcccttattatcaatgtcttcgtctgttttaagagtccgatggttcctttacattttactcgcgatacctactcaatggatggttcctcctttttaaataaaactaattattatatttatactccaggtgctattttaatatatattttaaaaatagtcccaggagtatcattatttgagctccgtacaaccatcatcgctatctccagccaggacctagtgcaaattcttaaccactcatgcctctgctttcgtgtcttacccgactttgatattgggcaaacaatcgtacctacctcccctgcgcgctgtgatattgtacccgatcgacgctgtcatgatggtaatcaatgtgcggtgatgtacgagacaacggcgacgtcatgacagagttcggatcattgaatgaagccatgatcaagcttcccttcctgcacgctgcacaacctcgtcaaagaactaagaacgaaaagcaaatgtgcagagatgcattaagcccccgtaactaaaatatcatcaccaattatattctataaagattataatatagttttgaatatatagtgatatttcatatgtgacagttacttcagtaagttagagagaaaactagtatctcatatttataaaacaattatgatatatatgcgggaaattattattgtatgtattcaattttactattttcctttagcaatatgtatttaaaatacttagtattattgtgctttgcaatgattttggcaatatgaggcgagatttgctgtatttatagcgaccacctgctagatttacgataaatcgaggtgcataaatgggtggaggcctagaattacgctaaaagcgccacaattgcacttttgaaagtgcaattgtggctgtgcagctgcaattctgtcggtttttattcacaagcacctacacacacggcaattatgcataagagggtggatatgctggggatcatggacggtggtgtactgggccaatgcatggctgctgagaggccctcccaagtcgatatatatatgaggaggtggatttatccataattttagcaggtcgtgtatcttctttcagacatattttggagcaggctttgccatatttagcgtctaaaatggtcggcaaaataactgcaaagcacaatatgagcatttatagatccttttatttttgttgcggttattgctgggagcacttgggccgagcactgcatcaaccccgcttaccgagcattcattaacacatcctatatatgcacttcgtaattgggcatcccatgacggtatcgccccacgactgcgcaagtagatcaataataaatgtcgcgttattaaacaatgctctctctagtttctagaagaaactttcatccgacaaataatgtattcgtaagaaaatactttgaatgacaaccatacaagtctcaagtccgctcctcttttactggagagccagcatagcgtgtactttccgattatgacgtagctgcacaacactcgtagcgacaacaaaaagcagtggtgtcaatgcagcctccacgtaagcaccactacagtacttattaatctgaacccctttcctaggtttcacactacactacgactgcatgctcctacatttatggggctgatgcgtggcgaggccagccctgcaaagcactttcaaggtagtgtccatgcttactcgtgctccacgtgcagtacactgttgttgccgttgcagctcgctcacggcgataaatttaggatagttcgttggcacgaacgagctgaggcggtgcctgcttctgtcaaaacatgtgctgcagcgttgcattaatttagaatattcaatgttggttcggtgtacaacgttgctgctgcgtttcttggtgttgtaaggctacagtccgtactatggcgcccagaggcacagcgtctcaaaaggtgtctttcttatgccggcgtcgagttgaacgggcggcgacatatgcacacagtaagcgcatcggctcagccttcttcaacccttaccagatcctcgaattacgtatttacatccctggccgaaggagcagcacgaaccagtcaacggcagctaactttagcagtcggcagtgggcattcctagtcctcactttcgaatttgcctcaagtgaagcacatcaagacagccacggagccacaaaccaagctccattcatgaagctcatctccgcagcgttcgcgacgttcgctctcattgcggctactgttaatggctcgcccatggtgcgccaagaagctgagggcaacccagctcagcagcagcagaaaagcagcagcagcacgtgcagcctcactggtacctacaagaagggcacggacatttcgtcctgcaacaccgttactatcggaaacctcaacgtccctgctggtgtgacgctggatctgagcagggccaagaacggagctaccattcagtttacgggcaccaccactttcggaacgctcagtggaacggaccgctcgtgacgcttagtggaaccgacctcacggttaagggcaacggcaagcttgacggccaaggtgcttggtactggaagcagggccagtcgatcacccgcccggttttcttccaggtgcacaaggtcatccactcgacgctgtcgggcttcaccatccagaaaatgccctaccgcacgttcagtattgtggactcgctgtacacgacgcttactggtctcacgctggactcgagggctggcaacggtatcgccacgaacacggacggctttgacctgagctgcaacgaccacatcacgatcacgggcaacaagatctacaaccaggacgacttcctggccatgcagtccagcaccaacactatcttcagcaacaactactgctacggcagccacggtatctccgtcggatcgcttggtggcaactcggtcgacaagacaactgtctgactgtgcagggcaaccacatccaggacagcgacaacggtctccgcatcaagactatcatcggcctcaagggtctcgtttccgacgtgaagttcattaacaaccacctgtcgaacgtccgctacggcgtcgtcgtgcactcggactacagcaagcagaggggaggctacactggtgcagtcaccagccaggcgcagattacgggcgtgacggtgtctggcctcacgggtactgctacgaacctgtacgacatcgtggtgaaccctaaggccgtttctgcttggaagttctcgggtatccaagtgaatgcggccgccaagggcaaggtgaacggtgcgcctaacagtgtcgccatttagaagcgcattatatccgccacgtacagtggcggccctgcagtctaccagaagactgacaattgagtaattacaccagaccaaatagaacattcgatgttgattaaagttattgtgcttcttagcccaacatactcataatgaaactccaaaacccgtgtatgtgtcgctacaagaccccaaatcagcgtcggattcataggcatagtactgtagaccagtatgatgaggtgcggtaaaaacgcaagcagcatccaattcggcatggtggtagatttttaaatgggtcttatgcagaacaggtcttggattggtcagatagtactttttctatgatctcgtgattggatcacattcgcatcggaagacgcaaaagactacattacgaaagttgtcaagcctcagcgcagtggctgccatggcgctggcaagcatccccgagatgccagcttctcggtgatgtcgagccttccagacctaacggtccagcacgtcatgcagtgagctccctccccacctgccggcaaccacagcgagctttgtgagctgggggatgcaggtgcagcagcagcagcagcctgcgatgcgctacgggaaagcgcgcacgacctccgcggacttgccatcggagaagtcgccgctgggcacgagacggcggctgcgtttcaaggagaaggagaacgcgggcatgcccgctgtgcatcgccgccgacgacgactggccgcgcatcttgtgatcaagagctctacgcgcggcggagcgcatctcgaggtgctgatgcctgtgggcgatgccagcgctgtgatggggtacatgctacgagaccctcggaaagacaacgacaagaacatgctgctatctggtatggcgtgctgcctggacacctcaagaacactgaacgtaagtgtgctccgaattcgccatcgttcttgatcaaacgtgtgactaactgggaaaacgtcatgtctgaattcccctgtcttgcttttaggcgctgaggacacgaagcacaccgatggcatcctttccccgccgcgcggacttgatcagatgagcaccggcccgctgactttctcacagaacgtgtacctgaaggactacgtgctcgacattgtgctgaccaagtccaagcacaagaatcccaagcgtacgacggtcgtggagctggaggcgccaggcttccgtcaccgccgtgggcctggacggcaccgcagcctcacaaaatacgctgaccagggcaagatctcggtccacacttgccgcgggctctcggtcgtgccgcgctcgccacttttcccatacaagttgcctgattcaaagagtaagacttggaagcgctaggacggtaggtactgcaggcgagacagacagaccattaggaaaggactcaagtctgcgtactacgtactttcatgtcgattcgaatacaattgcttcgaacactgtattgctgcgaggttatacaatgtgttatgcgtccttggcattactggcccagcttcttcagcaacgttgcgcacttcggctacggtactttactacgccccaagcaaagcaactgggtatcccagttactgggtgtacaccttgtgtgctttgtgttgtttcccacaattttcttttcttacattctacaccttttcagcttcaaaactgcaaattgtaagttcaattttgcaaaaggtaagttcaaaactgcacgagcagagaccaggctagcttcgtacttgtatacacagctcattggttggcacgctgcacagctagccaatagacaaattgtactctataatcgtatacaatgatagatatcattcagtttgtaatatacatttatggagtattgttgttttgatcttaccttttgctgttttgaacttacaatttgcagttttgaagttgaaaaggtgtagtacatcttaccaacgtagaagaatgtccagcatgcaaggttaccgctagtgcgttttgctgtgggtagaaactcggaagagatagatgcagataccggtacatgcactaacttacagttagaaattactagcagtgatagtgatacatcggagaatgctactgcactgtgcagtctgcacatgtctgctcattcgagtaaccagtcatatagaccacctttatctacaacatacttagtaggacacatatctaggtagttgaacggagcatggagatggatcgtcgtgccatgttccactgctgtggttgtttggttcaggtctacggattcggtctcacaatcagcatgttcaaattctagacctgatctgcataagaaccaaaataaaggcaaccggcatggtgacggatcaagaaaaccgaccgaagctctcaacctcagtgattcgaaggcccctgaggtgggcactcgccagcggctgatacttcagaacgcgagctcgcccagaaacttgaatgtagcgtggattacatgcgtgggtgtacgcgagagtgttccgatgaaagacaagcgtgtgcggctgatacttgaagtcgaccgtctcagcgaggcatttgagcacctagatatacaggatatcatgacgcgccactaaatgtttcgttcacctttcgaaggcggaagcgtgcgaaccaacaagcggtccgactgtggacacaacaaaaggcttcgtataccaagtgcggagcgaatatctctactcgacactgcacctaggtccagaaccacaggtatagttctcacgacgccgtgtgtcctgtacgcaggacgtcaacgtcccatgaagagcgacgacacgaatgcagcgcaagatacttcgtagattaattatgaggcgacggtaaattaatctagaaaatggcgactaaaacgaacatgcagcaagtgcacgatacacatgtaaagcgcttttgaacggcgataagacgtgcgttcatgcgacggtggtgctgaccgctgcgtcgccgccttcgcggagaccggcatcgtcccggcggagaattggcggcagacaaactgggtacttgtgggcgacatgtggacattgaacaaacgtgtccaaagccgagtgcggctttccaccctcggcaacgcgcatctcgagcgctgattgagataccggtagcgagctggaagagcatttaacagcaccggccgaccttcacccaggcctatcgaatagtacacgtacacccaaagagcatgcctgcagttttgcctggggacgaaaagaagattggagttcataaacctccacatattaataccatatctatcgcgccatcgaaagctaggactttgcaaatcagacatggagcgcgctcgcgtcgacgacgacacaaaaaccaacaagcgcgtgcgtgcgtacgtgcgtgtgcgtgcgagagcagcggtatgagagcgcagtgtacatgtatgtacagtattgaaacgagcgcgtctgaggttttaggtctcgaaagatcgattcaaagcaagatgtcgactcagagagcacagacggcagtgcacacaagtgttttttgtagcacttgtgctccgccctcatactacgcgcgcgtactggtactgcaaataataactgcacagtaatcactccacgagtctcgaagttatgtcttgctgtcgagcactcttctcttgcgggattctcgctgccatcaggccctgattcagcgcatccagctggtggattcggtgaaaacacttgctgcagacggagacgggacgtcgactaattgacagcacgaccttggtctctgtgacctgcgcagacacgagatgtaccggttcaacgctggagctggctgcgccgaggcgaggcggacctcgatttgcagccttgtggacttgggcctccgcggtgcagtgcagaagactgggtccacgctggcgttggtccgactacagtactagtacatgtaacgggtcaaaggcgcgcgttgcgtccgattgagctggggagacggcggccttggccaggtggcggtgcgctcctgacatagggcgcgcctgatgtcaggccgagccttgacatgtttgaagcgttcgaacaccacagcgaactaacggtccccgactcacagtaaatgccacagtgccccaaggccgctctcatagcgcccgatttcgttgaccagtggccactcactcttgctcactttccattttgcaccgggtgcagcaagcaaccaagccagccaccgaccgcaaacaagtctcttcatcctctccgcatcatgaagttcttcaccactgcgctcgctgtgttcgcgctggtcgccacgaccgccaacggctcgcccatgctccgcatggaggccgagggcaagaagggcaagtccaagaccaccgcccccgtggtggaggccgacgacgactacacgcaacagcaggacccgactcagcaggacgacccgacccagcagacccagcagcagtcgcccacgaccaagacgagcagcggctgccacctcacgggcacctacaagaagggcaccaacatcgcgtcgtgcagctccatcgtggtggactcgctgacggtccccgccggcgtgacgctggacctgagcgccgccaagacgggcgccaccatcgagttcgtgggcaccacgacgttcggcacgctcaagtgggagggcccgctggtgcgcgtgagcggcagtgacctgacggtcaagggatcgggcacgctggacggcaacggcgcctggtactggaagcagggccagtcgatcacgcgccccgtgttcttcaagctgcagaacgtcatcggctcgacggtgtcgggcttcacgatcaagaacatgccgttccgcacgttcagcatcgtgacgtccaaggacacgacgctgagcggcctgaccatcgacaaccgcgccggcaacggcatcgccaagaacacggacggcttcgacctgaccaagaacgaccacgtcacgatcacgggcaacacgatctacaaccaggacgactgcctggccatgcagtcgagcaccaacacggtcttcagcaacaactactgctgcggcggccacggcatctccatcggctcgctgggcggcaacgccgtggaccagtccacgacggtgcagggtctgaccgtgcaggacaaccagatcgtcaacagcgacaacggcatccgcatcaagaccatcatcggcctcaagggcctcgtgtccgacgtcaagtacgtgcagaacacgctgacgaacgtcaagaacggcatcgtgctgcactcggactacagcaaggccaagggcggctacacgggctcccccacgagccaggtgacgatcaagggcgtgacggtgtccggtctcaagggcacggccaccaacctgtacgacatcgtggcgaacccgaaggtggtgtctggcctggacttctcgggcgtgacggtgagcgcgtcggtcaagggcaagctggctggtgtgcccaacagcctgagcgtgtagagtctgcagacggtctgaagtgaagtgttaagcagtactagtagttggttgtgtttctgtggccagtcgaaggctgatttggtaaattgaatggaagtccattgagatagactacctaggttttacttctgcggagcgcactgcaatacaatccactgttgacaggtgacttagacactatgaagctaatgtcgatggatcttcgtgctttatcgtgcacttgctactgtagtcgtttagtcgccatttgctagattaaagtcgcctcataattaatctacggcgtatcttgcatcaagcgctgctgcattcgtgtcgtcgctcttcatgggtcgttagacggtcagccgcgccgggcgtcctgcgtacaacgcacgcggtagcgtgagaggaacagttacagcgcattgaagtcgatgcatgtagttttgttttaacacgcttccgggagaattgggatggttcggtgtcgaattgagatgcatatacatttattcgctgcagtagataaacgaaacattttgctgcgtccactctcgggccgcttggtagttccacgcctccgctttggaacgtaaagtggccttctatttgagcttaattaactgatctatagaagcctgataaagcattcagcggcgcgtcatgagttatatacttcaaagtatatggtaagtgtacgtgctcaaatgcctcgctgagacggtcgagctcatagacaccgcataagctgtctcccatcgccatactcgccgcgaacatccgcggatgtaatccatgctttcaagtttctgggcggattcgcgttctgaagtatcagccgctggcgagtgcccacctcaggggccattgaggttgacaccgtcacatgccttgattgtttcggccggttttcttgatccgtcaccattgaccccatggcgttggcagaagactacggcgcccatcgacaaaccgtctacgtggtattgcagtcagcaccacagaagtaaaacctaggtagtctatctcaatggacttccattcaatttaccaaatcagccttcgactggccacagaaacacaaccaactactagtactgcttaacacttcacttcagaccgtctgcagactctacacgctcaggctgttgggcacaccagccagcttgcccttgaccgacgcgctcaccgtcacgcccgagaagtccaggccagacaccaccttcgggttcgccacgatgtcgtacaggttggtggccgtgcccttgagaccggacaccgtcacgcccttgatcgtcacctggctcgtgggggagcccgtgtagccgcccttggccttgctgtagtccgagtgcagcacgatgccgttcttgacgttcgtcagcgtgttctgcacgtacttgacgtcggacacgaggcccttgaggccgatgatggtcttgatgcggatgccgttgtcgctgttgacgatctggttgtcctgcacggtcagaccctgcaccgtcgtggactggtccacggcgttgccgcccagcgagccgatggagatgccgtggccgccgcagcagtagttgttgctgaagaccgtgttggtgctcgactgcatggccaggcagtcgtcctggttgtagatcgtgttgcccgtgatcgtgacgtggtcgttcttggtcaggtcgaagccgtccgtgttcttggcgatgccgttgccggcgcggttgtcgatggtcaggccgctcagcgtcgtgtccttggacgtcacgatgctgaacgtgcggaacggcatgttcttgatcgtgaagcccgacaccgtcgagccgatgacgttctgcagcttgaagaacacggggcgcgtgatcgactggccctgcttccagtaccaggcgccgttgccgtccagcgtgcccgatcccttgaccgtcaggtcactgccgctcacgcgcaccagcgggccctcccacttgagcgtgccgaacgtcgtggtgcccacgaactcgatggtggcgcccgtcttggcggcgctcaggtccagcgtcacgccggcggggaccgtcagcgagtccaccacgatggagctgcacgacgcgatgttggtgcccttcttgtaggtgcccgtgaggtggcagccgctgctcgtcttggtcgtgggcgactgctgctgggtctgctgggtcgggtcgtcctgctgagtcgggtcctgctgttgcgtgtagtcgtcgtcggcctccaccacgggggcggtggtcttggacttgcccttcttgccctcggcctccatgcggagcatgggcgagccgttggcggtcgtggcgaccagcgcgaacacagcgagcgcagtggtgaagaacttcatgatgcggagaggatgaagagacttgtttgcggtcggtggctggcttggttgcttgctgcacccggtgcaaaatggaaagtgagcaagagtgagtggccactggtcaacgaaatcgggcgctatgagagcggccttggggcactgtggcattcactgtgagtcggggaccgttagttcgctgtggtgttcgaacgcttcaaacatgtcaaggctcggcctgacatcaggcgcgccctatgtcaggagcgctccagcagctgagccggtcgaccaccgtctccccagctcaattggacgcaacgcgcgcctttgaacgcaacgcgagcggtgacccattatgtcgaccgcaccaggttgcacggtgcaacttgcatcgcagtgggccaagcccacaaggttgcaaatcgaggtgaaccgcgcagccagcgtgtgaaactcggagattcgcagcaagtgttttcgccgaatctagctgctgggcgcgctgctgcgtccttgtggcggcgagaatcccgcaagagcaggacgagctcgtagcaaacctctgcagtattttagcacatgtacagctaaaatactggacttcgcacacggcagttcatcatctccggcgagctgcgagcccatttttcccagctaaacgcgttacatgtacatgtactgtattaaatgctttggatttcaatacgcgcagccacgcacggcgttgtttttggcgttgtcgacgcgaacgcaccccaccccacctctgatttgcaaactcccagcgctcaaccactcgacattcgctaggcgacgggagttgctgatgaacgtcaccggcggtgattttgttaatagttccagggttcgctcttctcaaagctctcaagtactgtaagccacgcgggtttgctctcatgtacgtttgactgaattcgcgtaagcttactgtagaatatatattatacttagtagtgtattgttaggaaaagctttgggctcgatgcctcgatcattgtggaaagccgcagccgcttcaacaactggtatatttgtccaatactgtaccgtactgtatctacagtactgtacacctcgcttgcaagggctccagccagtagagtcgactgtcttcagcctattcctcggtaccgtaccattaataagtagggcgttgccggttgtctcagaggcaacggcgagccagtatcgtcaaagtatcatcgctcgtcctgtcgtcggcagctgtgaacgtgctgcttcatcgcgcgcttgctagtcgtttagtcgccattttcaggattaaaatcgcctcagaattaatctccagtgcatcgagcgatgaatctgcgctcgtgccgttgctcttcttgcgtcgttagaggatctgccgagccggacggactgcatttaacacgcacaacgtcaacaggtacagtactgcacagcgtctgcaggaagtttgagtcttgctgtatagtttaccaataccgtacctacttcaagacgtacttccgggagaagtcgggttgttacctgggtgcggtgtcgaatagagacaggttgggcattccgttttggagtcgataagaggtaacactttgttgcgtctacatcggatcgcttgttgtcggatccgtttcaaaacctggaaagtatagaatcctgtctcttacatgtaggtatcctgggcagaatgtatagcttgtaggcacgttcacggatgtcgacgatgcgtggaagaaacgcgtgcaccagccagttcatcttcttacaccatgctccattggtgatggatcaagaaagttggccgaagcaatcacgcacaggagtgttctgtaccgatgcaggctgtgattgaagcaacactgatatccatgtcgacggacctacactaggctcgtagtgttgcccgacagcaacactgatcgtttcccacaaatagtttacctgtatctctcgtagcaggtttccgggcactgtgtgcatcacgcaaggcacccccgatttcgaaatcgcttcagttgagaattgtggagctcactgggggctatatccagcagcatgtcgtgggactgggccgaatctggtttatcctgaccacagtatgtttcgctactctgtggacgcaacgaaatcgagtcgtttttgaagatgaagaaacatcagagtcaagtgttgcggaatttcaagtcgccggtacacgccagatacaggcagtagcaagacacgagagccgagatcctaaaacggcagacaacggtgctgcgttacagctgtgtttggatagttctctgagtatgccgacaaatccgtccaggcagacatttcgacaagcagccccaggcctttgctggaagcaatcaaaaccaatctaggactttaataatatgaactattaataaataaagtatcttctactattgtgctttgcaatgattttggcaatatgaggcgatatttgctgtatttatagcgaccacctgctagatttacgataaatcgaggtgcatagttgggtggaagcctagaattacgctaaaagcgccacaattgcacttttgaaagtgcaattgtggctgtgcagctgcaattctgtcggtttttatccacaagcacctacacacacggcaattatgcataagagggtggatatgctggggatcatggacggtggtgtactgggccaatgcatggctgctgacaggccctcccaagtcgatatatatatgaggaggtggatttatccataattttagcaggtcgtgtatctttttacacatatatttaggagcaggctttgccatatttagcgtctaaaatggtcggcaaaatcattgcaaagcacaatactagaataaaaatagatatcttaacgtggtaatctataccgagcttggtaatctattttcatggctacagtacaaatgttgaacaagctaacttgtaaacttgggcgttcaggattaatcaacacgctgtagatcgaggagtgcatctagcgaggtaaatttcgcaggaaaatctacctcaacgtacttcctttcaatttatcgaaatggccctctacagtagatcgccatcaagattattacagcatactagacttaaaaccaacactgggtttttctacacgctcaggctgttgggcacgccagccagcttgcccttgaccgacgcgctcaccgtcacgcccgagaagtccaggccagacaccaccttcgggttcgccacgatgtcgtacaggttggtggccgtgcccttgagaccggacaccgtcacgcccttgatcgtcacctggctcgtgggggagcccgtgtagccgcccttggccttgctgtagtccgagtgcagcacgatgccgttcttgacgttcgtcagcgtgttctgcacgtacttgacgtcggacacgaggcccttgaggccgatgatggtcttgatgcggatgccgttgtcgctgttgacgatctggttgtcctgcacggtcagaccctgcaccgtcgtggactggtccacggcgttgccgcccagcgagccgatggagatgccgtggccgccgcagcagtagttgttgctgaagaccgtgttggtgctcgactgcatggccaggcagtcgtcctggttgtagatcgtgttgcccgtgatcgtgacgtggtcgttcttggtcaggtcgaagccgtccgtgttcttggcgatgccgttgccggcgcggttgtcgatggtcaggccgctcagcgtcgtgtccttggacgtcacgatgctgaacgtgcggaacggcatgttcttgatcgtgaagcccgacaccgtcgagccgatgacgttctgcagcttgaagaacacggggcgcgtgatcgactggccctgcttccagtaccaggcgccgttgccgtccagcgtgcccgatcccttgaccgtcaggtcactgccgctcacgcgcaccagcgggccctcccacttgagcgtgccgaacgtcgtggtgcccacgaactcgatggtggcgcccgtcttggcggcgctcaggtccagcgtcacgccggcggggaccgtcagcgagtccaccacgatggagctgcacgacgcgatgttggtgcccttcttgtaggtgcccgtgaggtggcagccgctgctcgtcttggtcgtgggcgactgctgctgggtctgctgggtcgggtcgtcctgctgagtcgggtcctgctgttgcgtgtagtcgtcgtcggcctccaccacgggggcggtggtcttggacttgcccttcttgccctcggcctccatgcggagcatgggcgagccgttggcggtcgtggcgaccagcgcgaacacagcgagcgcagtggtgaagaacttcatgatgcggagaggatgaagagacttgtttgcggtcggtggctggcttggttgcttgctgcacccggtgcaaaatggaaagtgagcaagagtgagtggccactggtcaacgaaatcgggcgctatgagagcggccttggggcactgtggcattcactgtgagtcggggaccgttagttcgctgtggtgttcgaacgcttcaaacatgtcaaggctcggcctgacatcaggcgcgccctatgtcaggagcgctccagcagctgagccggtcgaccaccgtctccccagctcaattggacgcaacgcgcgcctttgaacgcaacgcgagcggtgacccattatgtcgaccgcaccaggttgcacggtgcaacttgcatcgcagtgggccaagcccacaaggttgcaaatcgaggtgaaccgcgcagccagcgtgtgaaactcggagactcgcagcaagtgttttcgccgaatctagctgctgggcgcgctgctgcgtccttgtggcggcgagaatcccgcaagagcaggacgagctcgtagcaaacctctgcagtattttagcacatgtacagctaaaatactggacttcgcacacggcagttcatcatctccggcgagctgcgagcccatttttcccagctaaacgcgttacatgtacatgtactgtattaaatgctttggatttcaatacgcgcagccacgcacggcgttgtttttggcgttgtcgacgcgaacgcaccccaccccacctctgatttgcaaactcccagcgctcaaccactcgacattcgctaggcgacgggagttgctgatgaacgtcaccggcggtgattttgttaatagttccagggttcgctcttctcaaagctctcaagtactgtaagccacgcgggtttgctctcatgtacgtttgactgaattcgcgtaagcttactgtagaatatatattatacttagtagtgtattgttaggaaaagctttgggctcgatgcctcgatcattgtggaaagccgcagccgcttcaacaactggtatatttgtccaatactgtaccgtactgtatctacagtactgtacacctcgcttgcaagggctccagccagtagagtcgactgtcttcagcctattcctcggtaccgtaccattaataagtagggcgttgccggttgtctcagaggcaacggcgagccagtatcgtcaaagtatcatcgctcgtcctgtcgtcggcagctgtgaacgtgctgcttcatcgcgcgcttgctagtcgtttagtcgccattttcaggattaaaatcgcctcagaattaatctccagtgcatcgagcgatgaatctgcgctcgtgccgttgctcttcttgcgtcgttagaggatctgccgagccggacggactgcatttaacacgcacaacgtcaacaggtacagtactgcacagcgtctgcaggaagtttgagtcttgctgtatcgtttaccaataccgtacctacttcaagacgtacttccgggagaagtcgggttgttacctgggtgcggtgtcgaatagagacaggttgggcattccgttttggagtcgataagaggtaacactttgttgcgtcctcgtcttgcttccagttgaggaatatgctggcaaatttagtacgcgccaggaaaaagttgcttttaatttgttattatacgtatgacttcagttgttcgctgagacggtggaattggccagctttgcctttgttaccacagcgctcatgtactgtacatgtattcaagtttctagatgagctcgtgttctaaagtagcagccgctggttactgttgctgcccacctcaggaacctacatgtacaaacttattgaggctgagatttgtttacactacacctgtacttggaacattgttgagtcgggaagtcattaaagcaacactgacaaccaggtccaccagcaccactacaaccgtacttttactaagtaaaaaaaggtcacatcgctaatgtaaattttccaggcgtgaatttcacgtttggagcgactggctcgcaacagctcatttcagaatctaccgggtagcgcgctcgcgccctccctgatgtgcgaccgtctgcagcggcctcctgcttaaccttattctaatgtgtgcatgtccttctgtggtgcttatatacatgcgtgtactatgcaggagcaaacgccttcccagtgcgcaaagcttgtacttctctaaattgagctaattctaatttcatagtaccagctcctagtccattcgtgagcgatgcgtgttgaatgcgattcttttgaagcagtcgtaagcgcttttaatgcgcctccagccaacagcgcaacatctcagttaggttaacgggcgtgagcctcactgcgcgcattcaccgatcgctaacacacgcagataaggcgggtgttgcgtatgcgagcgttgcaaccacatatattttccgcatccactctcaacacttgtgcgtggggcaaggcaatccgttcattattagagaaggcaagcctcagctcggggctcgcagagagctgagctgaggcagcccagggtgaggtgtggtgggttttgcgagcgcgcagtggtagcgactcatgctgggccgcgctcggtgttggtcttgggcgctgcttgtccgaggcgagggaagaccacaaatgagcggattgcctaatctaatcctacctagcgctgggaaaacccgcccagccggacactgcattctgcagggccgtatctaagcgggaaaccagggcacctactagtcctgtcaaccttaccttacacacctccaacctcccacaggttaaggtaaggttaatctcaccttcctaacctccctaacttcccctttacaaaactcagtataatggaaaaagccgggaccaaactcccagccaactcgggctcggaactggtagtgggcgtacaataccttgggcgtggctgcagctaccagcctgcacgaacgcagcatattgcaggacagatttctaagcctcaccgtttgatctaccaataatgtgaacttctacagtgtagtagtaaaacaatattgtacctttccatccatttacttcagaagtacaaacatgtatcgatgactaagtcgttgtctgtacagcgatctgtccaagttgcggaggatgcgagtgccgctattaacgtcgatcgtagctctttaagacggtggtgggtcacacctgaacctgtgcctctgtacctctgtacccgcgttcatataaaacgagaacgtctagccttcggcttaacgaagccttgtcagcgtggcaggaggctagatgttctcgtaggcaacagtggacagacgccagtttgctgaagaaacactatcgacatgtgcgaggcgctattattcagcgcgtcagtggggaacggtgctcgttgatcatccaggtcgaccacttcaggctccaatcgagccagcttgaggtaccgtagtgtcgttaaggaggttaaagcgaaagtttagaaagtccagtgagtttggaggtgggttaaggttaaggaggtcaaggtaaggttacgacagctgaggttgacaggactagcacctacacacacacacatacacttgattggccccaatgagcggcgaggatgggaccgcgaggcttggtcatgacgcacgaagtcttggccgttcagcggaaaaacactttttccctacttgaaaaagtaccgtttccccaagacaccgagcgagtgtcctaccaactactacagtgttttacagtgctacccgtgccccccaggtagagctgcgcgtagatatcgtagagccccctctccccctgctgctgcacgtggcgcgtataccatcacgcgcttgccgcgtccgcgtctccaagcggcggaatctcggggcggcattgtacatgggcggcttggccgcgatgagccatgcagagtgcctgcatcgctgtcgtgacgcgtgtccactattgtaacattggtaaaccaaatattctgctacgagagatacaggtaaactatttgtgggaaacgatcagtgttgctgtcgggcaacactacgagcctagtgtaggtccgtcgacatggatatcagtgttgcttcaatcacagcctgcatcggtacagaacactcctgtgcgtgattgcttcggccaactttcttgatccatcaccaatggagcatggtgtaagaagatgaactggctggtgcacgcgtttcttccacgcatcgtcgacatccgtgaacgtgcctacaagctatacattctgcccaggatacctacatgtaagagacaggattctatactttccaggttttgaaacggatccgacaacaagcgatccgatgtagacgcaacaaagtgttacctcttatcgactccaaaacggaatgcccaacctgtctctattcgacaccgcacccaggtaacaacccgacttctcccggaagtacgtcttgaagtaggtacggtattggtaaactatacagcaagactcaaacttcctgcagacgctgtgcagtactgtacctgttgacgttgtgcgtgttaaatgcagtccgtccggctcggcagatcctctaacgacgcaagaagagcaacggcacgagcgcagattcatcgctcgatgcactggagattaattctgaggcgattttaatcctgaaaatggcgactaaacgactagcaagcgcgcgatgaagcagcacgttcacagctgccgacgacaggacgagcgatgatactttgacgatactggctcgccgttgcctctgagacaaccggcaacgccctacttattaatggtacggtaccgaggaataggctgaagacagtcgactctactggctggagcccttgcaagcgaggtgtacagtactgtagatacagtacggtacagtattggacaaatataccagttgttgaagcggctgcggctttccacaatgatcgaggcatcgagcccaaagcttttcctaacaatacactactaagtataatatatattctacagtaagcttacgcgaattcagtcaaacgtacatgagagcaaacccgcgtggcttacagtacttgagagctttgagaagagcgaaccctggaactattaacaaaatcaccgccggtgacgttcatcagcaactcccgtcgcctagcgaatgtcgagtggttgagcgctgggagtttgcaaatcagaggtggggtggggtgcgttcgcgtcgacaacgccaaaaacaacgccgtgcgtggctgcgcgtattgaaatccaaagcatttaatacagtacatgtacatgtaacgcgtttagctgggaaaaatgggctcgcagctcgccggagatgatgaactgccgtgtgcgaagtccagtattttagctgtacatgtgctaaaatactgcagaggtttgctacgagctcgtcctgctcttgcgggattctcgccgccacaaggacgcagcagcgcgcccagcagctagattcggcgaaaacacttgctgcgaatctccgagtttcacacgctggctgcgcggttcacctcgatttgcaaccttgtgggcttggcccactgcgatgcaagttgcaccgtgcaacctggtgcggtcgacataatgggtcaccgctcgcgttgcgttcaaaggcgcgcgttgcgtccaattgagctggggagacggtggtcgaccggctcagctgctggagcgctcctgacatagggcgcgcctgatgtcaggccgagccttgacatgtttgaagcgttcgaacaccacagcgaactaacggtccccgactcacagtgaatgccacagtgccccaaggccgctctcatagcgcccgatttcgttgaccagtggccactcactcttgctcactttccattttgcaccgggtgcagcaagcaaccaagccagccaccgaccgcaaacaagtctcttcatcctctccgcatcatgaagttcttcaccactgcgctcgctgtgttcgcgctggtcgccacgaccgccaacggctcgcccatgctccgcatggaggccgagggcaagaagggcaagtccaagaccaccgcccccgtggtggaggccgacgacgactacacgcaacagcaggacccgactcagcaggacgacccgacccagcagacccagcagcagtcgcccacgaccaagacgagcagcggctgccacctcacgggcacctacaagaagggcaccaacatcgcgtcgtgcagctccatcgtggtggactcgctgacggtccccgccggcgtgacgctggacctgagcgccgccaagacgggcgccaccatcgagttcgtgggcaccacgacgttcggcacgctcaagtgggagggcccgctggtgcgcgtgagcggcagtgacctgacggtcaagggatcgggcacgctggacggcaacggcgcctggtactggaagcagggccagtcgatcacgcgccccgtgttcttcaagctgcagaacgtcatcggctcgacggtgtcgggcttcacgatcaagaacatgccgttccgcacgttcagcatcgtgacgtccaaggacacgacgctgagcggcctgaccatcgacaaccgcgccggcaacggcatcgccaagaacacggacggcttcgacctgaccaagaacgaccacgtcacgatcacgggcaacacgatctacaaccaggacgactgcctggccatgcagtcgagcaccaacacggtcttcagcaacaactactgctgcggcggccacggcatctccatcggctcgctgggcggcaacgccgtggaccagtccacgacggtgcagggtctgaccgtgcaggacaaccagatcgtcaacagcgacaacggcatccgcatcaagaccatcatcggcctcaagggcctcgtgtccgacgtcaagtacgtgcagaacacgctgacgaacgtcaagaacggcatcgtgctgcactcggactacagcaaggccaagggcggctacacgggctcccccacgagccaggtgacgatcaagggcgtgacggtgtccggtctcaagggcacggccaccaacctgtacgacatcgtggcgaacccgaaggtggtgtctggcctggacttctcgggcgtgacggtgagcgcgtcggtcaagggcaagctggctggcgtgcccaacagcctgagcgtgtagaaaaacccagtgttggttttaagtctagtatgctgtaataatcttgatggcgatctactgtagagggccatttcgataaattgaaaggaagtacgttgaggtagattttcctgcgaaatttacctcgctagatgcactcctcgatctacagcgtgttgattaatcctgaacgcccaagtttacaagttagcttgttcaacatttgtactgtagccatgaaaatagattaccaagctcggtatagattaccacgttaagatatctatttttattctagtattgtgctttgcaatgattttgccgaccattttagacgctaaatatggcaaagcctgctcctaaatatatgtgtaaaaagatacacgacctgctaaaattatggataaatccacctcctcatatatatatcgacttgggagggcctgtcagcagccatgcattggcccagtacaccaccgtccatgatccccagcatatccaccctcttatgcataattgccgtgtgtgtaggtgcttgtggataaaaaccgacagaattgcagctgcacagccacaattgcactttcaaaagtgcaattgtggcgcttttagcgtaattctaggcttccacccaactatgcacctcgatttatcgtaaatctagcaggtggtcgctataaatacagcaaatatcgcctcatattgccaaaatcattgcaaagcacaatagtagaagatactttatttattaatagttcatattattaaagtcctagattggttttgattgcttccagcaaaggcctggggctgcttgtcgaaatgtctgcctggacggatttgtcggcatactcagagaactatccaaacacagctgtaacgcagcaccgttgtctgccgttttaggatctcggctctcgtgtcttgctactgcctgtatctggcgtgtaccggcgacttgaaattccgcaacacttgactctgatgtttcttcatcttcaaaaacgactcgatttcgttgcgtccacagagtagcgaaacatactgtggtcaggataaaccagattcggcccagtcccacgacatgctgctggatatagcccccagtgagctccacaattctcaactgaagcgatttcgaaatcgggggtgccttgcgtgatgcacacagtgcccggaaacctattaggtccgcaggtgaaggcgtagcccccatccagtgcccaattagccattcccaacagcgacgagcacacggacattcccaaaaaatgtgcgtttgggtctccttcgttcgacaacatgctgcaagtttgcggcacgttttatcatcttccctttcatcaaatagaaattgagctggcgaactgccatcctatatgccacccagacttgatatggtatgagcgaattgccgtgattacacaaacgacgtggcttctgctacgttgccacggatctgagtttgcctgggtttcgaggctgtcgactagagatacctgtacgcagctcgtgcttatagcgcgcgaaggtattggataatgcaccccgaaaacgccccaaattccaaagtttttcccaaatgatttaagaccatgggaacgttttggtacatatttaggacagaataaccttcagtatgaaagagcagcacagggcggacactcgcgcgttggctctcgtctgcggacttagcgacgggtctgcggggggcccgcccctctctcgcttcgctcggggggggggggggggggggggccccttccccttctaccccacccccttgtcccttacgctaagttcctcgtctcggccaggcgcggtgtctagaaaaaaaacatcaggttgcagcgctcgcgttcgctcgctcgcacaaacacgcccccgcctaatcggcgggtgttggcgattagtgaatgcatcgagtgaggctcgcgctcgcgtccactcgccctcgcccatagactatagatcataatcagtcaactccgttttggtacatatttgggatagttttacgagaaagcagtcatatacttggccccaaatatgtacctaaatgttacagagacaattcattatttgggacatttggggcgatttgggcacatatttgggatgcattatcagcttcccgcgcgaaggcttgcttcttgagtcgcttaccactcgacggttcagaatgatatcgtcactggtccacggaaactggtgcagctcgggatgcgcttgaaaaactacgccttccgtttagacccaagttcggctttgctttgcgtctgctgagtccttatccagtagttccaacgagcaatcgatcccattcggtagctggacgcatttgcatctcgtatttcgttggggtttcccaggcgaagttcaagcacaaccccgtcggtcgttaatttccactcgtgatccttgaggcattcgggtgggtgccgaagcttaatcggcggcccctcctctgactcggtacttaatgttggtgtcgctaggagtatcgtcaatgcccagtggcacagtgttgagtgtctatactggccgtcggtgatggcactagcagggactttcatcgaatattcaccgggtgattattttcgtatctggagatcgcccactgtaccagtgttgcgtaaataaaaactgcaataaaactattgataaaattggggtcaataattacaattagaaaattggctgcaatgattttattgtattgtacaagacagttgacttgataactgtatgtgcgtgggtagccaatcaaatggtccatacagacccctatacaaaccacaataatacaattcaagggctacattgtacaattaaagttgtagcgtcacggcaaatctcaatcaatttttcaatgttaattgacgcaacgctgcactgtatacatcggccaatccggttgaaccgatttgcacttagcattttctccccgggacccactatccacgggttgtcactccattgaaaggttttccaaaacactttgatcggcgttggccagctcagctggtcggttggttctgctcggtgaaactgaatgactagcctcttgctttcacagctgtcccaccaactagtacaggtttcgtacaatctatcataattgcgccgaacccgatcggctcgttcccgcgactcctccattgaaggctgcagccattgactgagaagcttatagtctttgtcttcgaggtgcgaattcttctgcctggtgctactgttgagcggcgatattcgtctcgtgggtagctccgtttcttgacccgtccaatacttccatgcaggtgtttaaatatcggggcgctgcgttaaccagagaagtgcgtgcgttgcttgctgtgttttgattaatggtatcgagacgactcccagccccccagcaggaaaactgggctagggttgatcttgtggcggcctccatccactgcagtactcgcttcccagagaaagttcttctggatacttaacaattcacgttccgcccaccctggcagttgataagctgcggcagtgaatgttacccccggtaacacgattgcgttcactattgcgactctatcttccacagaagtagccactcgacacgcagttgccaatctccgctgtatttttcgtatccaattcttatcgtgggtctgaaaagttccgacttggtaccccaagcatctggttgtatcaccatgttttaataccgggatccccattagggtttccctgtgttcaatggcagtggtaaggctgatgaaaacgctcttagaaggctggacgtgcaaccccgataatgatccaaactcggtactttctccattacttgttgtacctgactcgccgttcgtacaaacactgtcgagtcgtccacaaacgctgagaataggtgatcccgcttgaggtggtcaccagacactggtattccctgtatagtagtcgtctgtgccagggccaatccaagcacctcggctgccaaaatgaacaataggggtgctaaaggacagccttgacgaataccggaggctatttcgcaagggtccaagagctcgccattcaccataaattgtgccgtcgtaccttcatgtaaatttctcatgagctgaatgaattctggactaaacccaaagcgttccaataccaaaaattttctacgtaatacatgcgtacaattttaattgtaatgatattacaattaaaatactacggttaaaatgaatcgtaggtgtccaaacacaattatgggtatgtttagttaaactcttcatattaattggtttctttaaattactgtaattaagtacatgtcaataaatgattcaaatgaataattattattattactcttactattactgtactacaagaaaggaacaaaatttgaccattaaaatgtaaattttgtgtactgtatttttttaaaatagtttttacagtgtgtcgttttcaattttaaaattaaagcatttcaagtagaaaacgtataaaaatgcttctatattctaattaacagtaaaatacgatgtttcaaaatgtcgtatattttgtattataatttgttcagaaagacgtttcttcgaaaagcagatcatgcagccatgcaggaagagtgacgacacgaatgtggcgattaaaggcgactacagacaacgacggaaaaatccggcaacgcaaaacccagcattccatagacatgtccatacaaaacgagcgatgattttgtccaatcaaatttattttattcgtaaaaattagccaatcaccgcgatttaatttttgaatggctctggtaaatccccgtgtgtcattgcctaatttggagctggtcgactgagccgctcaaactgtttttcgagccatggaggacacgccgccgcccaagaagaagcagaagagctacaccgtccgcgagaagcgcgaagcggtccgcctcgtcgaagatgtaggggtggaggaggcagcccgcgagctccaacttgctcggggcactgtctatggctggtggaagcaaactgaaaagctttttagcttcactggccactccacctctaagtccctgaagggctagggccgcagggaagtatttcccgacattcctgcggtcgtcaccttcatgaaggacgtgcggcgcgaagagaaggtaagtttttttttagaatttcataatttgtagcgtttaaccgttaaactttatgctataatgtacaggccctcactacacgtggcattatgtccttcatgtgggcaatcgagttcaagtgggtcgaggactacctgcaaaggaagcggagcggcatcctggcgcttgagcgcgtggccgagagactcgcaattcgataaataattttgtttttgctaaaactccatccgtttcctaacatttacctttatttacgtgtttaggcatggttttacctcccagaagccacaaacggcaaagaaaagcaccgaggagctacagcaaacgcgcgccgagttcgcgctggacttctggaagacgcacgccgcgtacgggccggagggcatgtacaacgtggacgagactgccatcatttttgacatgcctccggctcggacgtgggcgggtagaggtcggcgggacgctgcgaggattgcgaacacgtccaagcacaccggccgcatgacggctgtactcacgattcgagctgatggtaagttttcctttttgttgttctcttaatttttattttttaaggctaatttgtatttgttatactatttttagggataaagctgccgattctgtttgttctgcgtggcggtcgaatcgacacaagcgagttcgaagagtatccggaaggaaacttctacaccgtccaagagaacgcttagatggacgctgttacgtggcgtttttacgtagaaaagttgttaaaatatgaagttgatggacccgctgtcctccttcttgacaactttgagtgtcatgtgtcggaagaggggcagcgggtcgttgctgaagttgctaatgctactgtggtccctctacccgcaaacaacacggctgcttgccagccgctggatgtcggtgtaatggggccactaaaggcaaagttgcgctcgaactggtctggcatcacgggtggtagtgctaaggaaaagcggctccgtgtcgttcgcgctacgattgctacttgggatgccatccccgaaagcactgtaattaggagctttaaggcagctattcctcagtatcctgagattagcatttgaataaaatgcagcttttttgcagaacattcggatttgtgttttgtttttgaacagttacgcaaccttttagccaatcatgtttttcttttttatctgtgccgtattttgtgttacactcctgaactatggaggatggcagtcagtcacgccggatttttccgtcgttgtctgtaaacgactagcgcacgtgcgagataaggcgcgttcgtcgttgccagtgacgaggcgtacagttctcttttagagagttttcatcgcttatgaggtgtgaaagaaagctataaagcgaataggcaccccgaagcagagttgtgtgggcacctccacaatacatgtacacttaacgagtattgtaatgaagctatttgatcccaactcgattccgtaaaaccagttgttgccatcttttctctgtacggttagacgaaatccgcgggctgtggctgtcgtgaggcggcattcaatcgcttcgatttgcccactcgttggctgttcagctaaaactcgcgcggtgtgtccaatcgagcagaagcagacgacgcgctcaagtgtatacagagggtggcgccttagagagacacctgatatattcatcatagacggggattttagtattgggggttggggtatagagaattagtatgcaatcctatgaattgatagtagttattagaggtgatcagttatatgccgtccctccaaggcgccaccttctgtacatgtatcggcagcgatatcttcaacgaagtttatatgtagcttagatgttcaaggggatactgtacatgtattctacgatgcagaatacatgtacagtatccccttgaacatctaagctcacgaaggcgcgtatttcatgtccctcgacacaatactgtgcctctccggcacggcctcaacaacactcctctaaagatggcccctctttcttcctcactttcggatttgcggccacagcagtccaactaaatcaaaccaaaccaatcctcacgcgccatgaagctcttcaccaccgcactcgccacgtttggactcatcgcttcaaccgccagcgccacgccaatgatgcgccaggaagccgagggtggcgatccatgcaacctcactgggacatacaaggcggggaccgacatctcgtcctgcaacaccgtcactgtcgggcctctcactgttccagctggtgtcactttggacttgagcaaaacaaaggcgggggctgctatcaacttcacgggcaccactaccttcggtacggccaagtgggagggcccgcttgtgcgtgtgagtggaaactccctcacagttaagggctccggcacgttggacggccaaggtgcatgatactggaagcagggcgagtcgatcacccgccaagtcttcgtcaagctgcagaatgtcgttgactcaaacgtgtcggggtttactctcaagaactcgccatttcgcacgtttagtctggtcacatcatgtgactcacatgccgagacacaaccgtcagcgggctcacgcttgattccagtgccggcaacggcctcgcaaagaacacggacggctttggactgaccaagagcgaccatattacaatcaccggcaacaagatctacaaccaggacgactgccttgctatgcagtccagtaccaacaccttcttcaccaacaattactgcagcggcagccacggcatctccatcggatcgctgggcggcaacgccgtcgacgaatcgacaacagtcgcgggtctgacggtcgagggcaacacgatcgttaacagcgacaatggtcttcgtatcaagaccgtcatcggacttaagggccttgtctccaacgtgaagtacctgaacaacaagttgcagaacgtggagagcgccattgccatccactcggactacagccggtcaaagggctcctactcgggggcaccgaccagccaggtgactatcactgacatcacagtgaacggtgtcgggtgccaagggtgtctgcaagggtcaaccgaatggcatcacttgctaaccagagaattatctcgatgtttagaaaagactgaaacgagcagaagaaactcgtgggcgttgtgtagcacgacagtggtgtgcggtgtggctatccgcaaattcagagactttaacacccttttaaatcccagcaatatctcgtgacttcgcgttgtagactttgtgaatcgaacatgcgtcagattctacgttctgcgcgcacgtctactggccgaagcaagcgaggatacactcgctcactttcgtgcattcagcacgccaacaaggattgactggacagtcgccccccccattcttaggtactggtggtgcgcgtcgtcttttcaacagctgggggcacgtcgtacgaaagcaaaggcgactaaacgactaagatcgacgcgaacgtggaatagcaagttcacatgcccgtcagcttgttgtttgccgcagcttgctgcccacggcaataggagaggaccaaagtctaccgcaatgtcaccagttttcttcttgactccagtgagtgatccacaatattgctgaaaactcgctcaaataaaatgaaatgacttgtgtggtgatttttgctactgtacgaaacaacaaggggttacagacaacgacggataaatccggcaccactgaatggcatcctccatagtaaatgtgccagaattctctgtcaggaacgatagagactgtacaaggcagtgacataaaatacacgtaacggagcataaagtacacaaaaatttagataaagtacttaaaaccatatggaatacaaatgtcaagtgtaaatctcgaagttgattggctatctgaattacttattgtaaaaagtacaacatatgtgtgccgggttttgcgttgccgtcgttgtctgtactcgtcgaaaacacttgttacagacggattgaaggatggcgccttttgtctctacgtgcgaacgaaatgtatcgaattatctccgcccttgaggcggaccacgatttgctagttcgtggttttgctaccgtagcagctacagactcatcagaatttgcgttaatgttgcacccacgttgcgtggatatcgctgagccgatgaccgcaagtttactttatttttcaaagcatctttggggaaaactggcgctccatggatcccctgtgcctggtaaatttactaagaaaaattaactttgtttaccagttttatggataagaacggatgcagtacacgccaccttcttattcactactggtacatgttggtgaggcctccatacaacactaacatgtacttcaagtattgatactgtacagcacctcgagtgcatgtgtacctatgcacagccatgtagcattagcagcgcgagaggaagtccaacgacacatcccatttcgcagcttggcgtcgtttctcggaccgatcacgtgcattgtatggccggcctgactcaacctccagcgaacgaaaaaaaattaagtcgccattcctcaatttgtcgccggaacagcagcaccaccgacacacaagaactgcaagactccgcccgcgccaagccatgaagatcttcacctccaccttcgccgcagttgtgctatttactgccgttgcctccggatcccccatgattcgtcaagaagtcgaggccggcgacccgtgcaccctcacaggcacgtacaaggttggcacggacatctcgtcctgcagcacgatcaatgtcgggcctctcacagtcccagccggcgtcaccctggacttgagccaggcgaaggacggcgccacgatcaacttcacgggcaccaccaccttcggaacgacgcagtgggttggtccgctaatctcggtcagcggcaactccctcaccgtcaagggttccggaacgctggacggtcaaggcgactggtactggaagcagggtgagtctatcacgcgccctgtcttcttcaggttgcagagcgcaattagctcgaacctgtcgggcttcatcatcaaaaactcgcccttccgcacgttcagcatcgtgacgtgccagcacacgaagctcagcggcctcacgctcgactcgagcgcgggtaacggacgtgctcacaacacggacggcttcgacttgagcaagaatgaccacgtgactatcactggcaacaagatctacaaccaggacgactgcctggccatgcagtcgagcaccaacacaatcttcaacaacaacctctgcagcggcagtcacggcatctcggtcgggtctatcggtggagaagcggtcgaccagtcaaccacagtggacggactcaccgtccagggcaacaccatcgtcaacagcgacaacggccttcgcattaaggctctagttggagcgaagggccgcgtcaccaacgtcaagtacatcaacaaccagctgcagaacgtggagaacgccattgcgatccactcggactacagcaggtcggccggtgcctacaccggcgccgctaccagccaggtgacgatctccgagatcacggtcgacgggcttcggggctcggtcgaccagatctacgagatcctggtgaaccccagcgctgtgtcggggtggacgttcaagggcatcaccgtgacaggggcaaagggcgtttgtaagggccagcccagtggcatcacctgctaaggcggttcgtgtctgatacatgtcgacgaaggatagtgtggtgttcaaaagcccaggaaaagaaaatacttcaaagtatggttcgaataaaatgaatgtactcgcatgtaaaaaatgctcaacttttgctgttcgagctccacgagctacatgtaagtactgtagtttgctgctgacatcagaccatagcactgaatcatgtcacgttgtacttacaataaatgtatttattgggctgcactcgcccaattaacaactaaacaaacgagacggccagatattgctttacacgcggacaatcaccgcctctttaacgcacaaaatatacgctagcctgagcgtaatgtaaagaggaacccagcaatgttgctgtagcccacgcggcaccatgcggcactctgcaacccgcgctgcttagcacttgacggtgctgggctggccgctgcaggtgcccgtcttgctcgccttgaccgtgacgcccgagaacttccagttggacacgaccttggagttggccacgatgtcgtagaggttggtggccgtgcccgagaggcccgatatggtgacgcccttgatggtgacggcgctcgtggccttgccggtgtagccgcccttggacttgctgtagtccgagtggatgacgatggcgttcttgacgttgctgagcttgttgtcggtgtaggtgacgtccgagacgaggcccttgaggtcgacgatggtcttgatgcggatgccgttgacgctgttgacgatggtgttgcccttgaccgtgaggcccgagaccgtgtcggccgagctgacggtggatccgccgagcgatccgatggagataccgtggccgccgctgcagtagttgttgctgaagaccgtgttggtgctggactgcatggcgaggcagtcgtcctggttgtagatcttgttgcccgtgatggtgacgtagttgttcttgctcaggtcgaagccgtccgtgttcttggccgtgccgtcgcccgcgctcgagtcgagcgtgaggccgctgatggtggtcttctgcgagttgaggacgctgaaggtgcggtagggcgagttcttgatcttgaagcccgagagcgtggacgagattacgttgttgaggcggaagaagacggggcggctgatggacgtgccctgcttccagtaccaggcgccctggccgtcgagcgtgcccgcgccgctgaccgtgaggctgcgaggctgctgccgccgagcagcacgagtgagccggcccacttcttctggccgaacgtgacggtgccggagatcttgatgttggcgcccgtcttggccttgctcaggtcgagcgtgacgccggcgggcacgctgagcgtgccgatggtgagcgtgctgcaggacgagatgtcggtgccggccttgtaggtgccggagagcgtgcaggtggaggcctcctgctcctggcgcatcatgggcgaacagcggtggcggcgaggagggcgagcgcggcgaggacggtggagaagagcttcatggtagctgctgggctggttgtcgagttaccttgagacggtaaaatgaaaaatgaagtgaaaagcttcgcgggacttgagaatagatgttatcggtgcacttcttgcacaatggcatggtcttcaaggatgcttggtggtagggatgtccttgcacgattgtcttgatgcccattcattagtgtttgcaatgcgatttgcagctctttccagagcatgaattctccccgaacagaggggaagtctactgcttggctgagagcggcgtgagttcaagcttctgatgtcattttgcctacagaatgccacaatacagcaaaactccatgcgagtttgttgaagtgctgtggccgtgctatacaccggcgcgactatcaaatcatctcgccagtcgggaaaacgaacgagtggacctgtctcaaagctcgatgcctcgacaagaacgagcttctggcattttgtagctagatatacagagggtggcgccttagagagacacctgatatattcatcatagacggggattttagtattgggggttggggtatagagaattagtatgcaatcctatgatatgatagtagttattagaggtgatcagttatatgccgtccctctaaggcgccaccttctgtactctatgagactttaagggggaaattggagatagatcggaatcgagactccgtacgcgttcccaagagctccgacaaatactcaggcatcaacaaactaggatattgtgtctaatgcccatttggacttgaaatcggcactttggaaatcttgaattaggcaccatacaaagatctatatattagtatggcaagtgaagcatatgatttagagacaagtcgctatcaacagtgtttgtgttcctggcaagagatatattcatggggccgagtgtgaagcgttgtcacaccgggactaattcacgggtagtcccgacactgcgtcgatcaagaatttcagtctgtgtggtggtgatgccaggtccaccaagctagagagctgttgttacccataatatcggataaattccatgatgcgcaacagagcgcaggtacagtgtagctgctccttgctcgttctgtggtatccacaagccaatgtaaggtaacgaagatttgataataagtcgattgccaggttacatgtagttagtttattatttaaaatacttactttggtatattggtctgttacgattgcctggtcgacccagctccatctcataatttggcaggtacggctgccgcggaatgcgccgtcatgtatgagagcttcattggcgtgccaaatgcacagagcagagggaggtcgagctagcacgaattatattggcgcgaagcttgaatagtgacgaaagtaacgggaggagggtggtggcagtggttattgtagcggcgacggaaagtggttctagtagttctagcccagttgctactgcgctagataagataaaagcaccgagaaatacatgtaacaacgacataaccatcaatggaccactatttactatattgaagctattctcttaaacaaggacattttgaaaactccatttaggtactttggattgtttatgtactaagtgcctagtttgtttatgcctgcaaatactgcaaaacaacgtcgatgatgtcacacaacttgtatgacacaagagccgcctcccgcgcggtctgcaaatcaatcgcgaccagaagctcacaatccttgccacttttctcggctctaatgaagctcaccacgctcgcgcgctcatagagcggcccgccaccaagaaggatcgcaaagatcgacatgaacatgtacagtaatgtgcgtgaataccggacgggtctacagctaatacccttgtatagtttataaatctgggcctacgatgtgacgagatggtgatgagcaaaggtactgagctaaaaatccattaatctcggtaatttgaatattggcgcgctttcgctttcctttaaaagcgttcctcatttgcgatcaaagcctcaaactaccaagccaccatgcccaagacccccacttctagcaaaagaccccgcctcactcacgcacagaagctccgcatcattgccaaggtggagagctcaccgagcatgtcctacgcggagatcgcggagtgggctgctgcgaggacgcctggtcgaaggttactgttgataccatacagcattgctcgggccttattaacaaggtttcttgacgagctaaataatatcaatacattcctttttcttaaccaatcggattcaccttatactcttggagaccttatatatatcaggcgtccggtattcagtatatgcgccacactaagatacagcaaagttctcctgcactagccgcaatgcggattgtatctggctattgttaattcactggcggttaagtggttctactgtactgtagaatcgccccaccgtttgtggatctgtacgcgaaataacatccgtgtcaaggcgatcaccaacctggtgtcgccactagcaaagaccaacatcaatgcaatattttccggggttttttattgaagaacgcgactggtgaagaacaacgctggtcgtgggtcgtgttggactgcgtgcagcagagatcgtgctgcaaggtccgcttgtgtagttggtaacacttcaacagaacaatacgacgcgcagctctgggtgctgcactgtagtgtactacgaagatgcttcatgcagcgtgatatcggttgttcaatgcgagatccgttcggaacacaggatgttccgcacgctcgccgaattgccacctggggtgggacgctgggctcacgtacccggtcgttgtgaatccgagtgcaggtgtcgaacagcccgacgacggcggacgcaccaaaaaacagcaaaacgtatcccactcccacctgacccgccttgcctctactgtaggcgaactgccacgacgaacatgcacaacaagttgctgacactcgaggtcactgctctgatatcgtgacctagtcagcccggggtttgaatttattgagcttgagactcccggctcataagctcctctcactggtccagtctcactcttcattttaccgtctcaaggtaactcgacaaccagcccagcagctaccatgaagctcttctccaccgtcctcgccgcgctcgccctcctcgccgccaccgctgttcgcccatgatgcgccaggagcaggaggcctccacctgcacgctctccggcacctacaaggccggcaccgacatctcgtcctgcagcacgctcaccatcggcacgctcagcgtgcccgccggcgtcacgctcgacctgagcaaggccaagacgggcgccaacatcaagatctccggcaccgtcacgttcggccagaagaagtgggccggctcactcgtgctgctcggcggcagcagcctcgcagcctcacggtcagcggcgcgggcacgctcgacggccagggcgcctggtactggaagcagggcacgtccatcagccgccccgtcttcttccgcctcaacaacgtaatctcgtccacgctctcgggcttcaagatcaagaactcgccctaccgcaccttcagcgtcctcaactcgcagaagaccaccatcagcggcctcacgctcgactcgagcgcgggcgacggcacggccaagaacacggacggcttcgacctgagcaagaacaactacgtcaccatcacgggcaacaagatctacaaccaggacgactgcctcgccatgcagtccagcaccaacacggtcttcagcaacaactactgcagcggcggccacggtatctccatcggatcgctcggcggatccaccgtcagctcggccgacacggtctcgggcctcacggtcaagggcaacaccatcgtcaacagcgtcaacggcatccgcatcaagaccatcgtcgacctcaagggcctcgtctcggacgtcacctacaccgacaacaagctcagcaacgtcaagaacgccatcgtcatccactcggactacagcaagtccaagggcggctacaccggcaaggccacgagcgccgtcaccatcaagggcgtcaccatatcgggcctctcgggcacggccaccaacctctacgacatcgtggccaactccaaggtcgtgtccaactggaagttctcgggcgtcacggtcaaggcgagcaagacgggcacctgcagcggccagcccagcaccgtcaagtgctgagcagctcgcgttgcagatggctgatgcgcagtgcagaactacagcaacgttgctgttgttgatctggtgctctaccacatgctgcgggccagcatatacctcattcgtttcgtctcaaatttgttggtagttaggcggttgcagtccgataaatacactttcttagatgtcttaactattatactcccaggggtttggagccctttgcaggttttgtgcaactacccctcaatttgaacgactcaaaatatgaacatagacatcaatgtattctcttcgttcactgacctagacaagactacgaagacattcctcttctgctacttccacgattcgtacgtcacgcgaaacaactcacaggctggagtctacaacagcattttggtttagcagctgataccgctgggctcgccgctgcagctgcccgtgtcaccagatacatcaatacccgagaacgaccagtccgacgcaacgtccgagtcgatgaggatgtcgtacaccgtgtcggctgagcccgtcaggccgtcgatggtgatccccgagatcgtcaccttactcgtagcagagcccgtgtacccgcccttggacttgctgtagtcgccgtggatcacgatggcgttctcgacgttcgacagcgtgttgctcgtgtacgtcacgtcctccaccgttccgtagtcgtcgatgatggtcttgatgcggataccgttgacgctgttgatgatcttgttgttcttgaccgtcagacccgagaccgtgtccgaagagctgacggaggacccaccgatggagccgatagagatgccgtgtccgccactgcaggtgttgctggagaagaccgtgttggtgctggactgcatggcgaggcagtcgtcctggttgtagatggtgttgcctgagatcgtgacgtccgtgttcttgctcaggtcgaagccgtccgtgttcttagcagtgtcgtcacccgcgctcgagtcgagcgtgagtccactgatggtggtagactcacaactgaggatgctgaaggtgcggtagggcgagttcttgatggtgaagtccgacaccgtggaggagatgactttgctcatgcggaagaagacggggcggtcgatggacgtgcccttctcccagtaccagtctccctggccatccagagttccggtgccgccaacagtcaggtccgtgcccgtgagagggttgagcgggccttcccactcggacgtctcgaacgtcgtcgtgcccgtgaactcaatggtggcgccgtccgcaacgtcgctcaagtccagcgtgactccggcaggcaccgtcagcgagccgatcttgatggtgctgcacgatgacacgtccgtgccgctggcgtaggtgcccgacagtgtgcagctgctggacgactcgttcacttggcgcatcatgggcgaagcggagacggcggaggccacgagagcgacaacggcgaggatgggggcgacaatcttcatgtgagatggtagtggaggtggagaaggagaaggaagaggcaatgcgctatcgaaagtaaattccggaatgggattggggatggcacgcgaagtgaaggagcccttcagggcccgccaccggagtcgggactccttgtgcatcagtagaggatgccgctaagcagtcgtggccgctctcagggacggcgaataatcacgtcaatctggagttgacgcctggcgtcagtgggtcttagatgtcttgacaaagttcacgtgtgagaggttgaacctgcttataaatgtgaaagcccgcgatattgagaagtagcttttgagcttgaataggaaatggcttggacgtcggcgcgaaataattcgatttacccgtttataacgatatgtgagacgatcggctgggcatggtttcctccatatgcctcctcaacgcaacaccagcgtggctcgaaatgaagctcgacgcacgagtccgccccccagcgccatcaattagggtggttcggcactagcagccgatgcagccacgctcttcccctcaacaagttgacctgctcacgagcataccatacatttttgctctgcccacgagattttaagtattatagttgatgagaacactgcgcggggctattaaacgggagtcttcacttaaaagcgtgagtcttcatttttttttagtaaagaatcgcagggcacccgagaatgcaattcttggattaatacttatctattcgagcagaagttaataattaaatcttttgtgaatccagaataattttctatataattagcaaaggagtaaacgagtagtgctccaactgcgaaccctgttagtctttcgttcttatgccttctgtgagctagaagactgagaaggttagctaaacctgtatttcttaatcttaagttgcgaggaactgataagaattctaacaataattcagcactttcaagaaattaatcattcaattataaaattcaaatgtatttttatgaagattattttttcgggtgctgaagaatcgactaaatgaataaacgctcgcgatacgatcaccgtaggcggggatgcagcagtgcgcgtctccgtgagtaggtagccaactaaaccgcaacaaattcaaagatgaacgctcgcgagttgctagaatcacacgcaagttgcattaaaacgaaaggataacagcaacgcatttctgtaaaaaatatctatctacgcaaacatccagtattcttcttgaagattattttggtgagctgcagcaccacgtcacagattatttgctgtacacaagggcaacttgtatgttgcagagagtgatggtcgtcgaagcttcgcgaagcgctgatcaagtttgtcagggttctagattgtaggaactagagcgagctgctaaggtctcgtaggtaaagcttttgattcaatctcactttccattctacactgcatcgcaaaagaagagttcaagtcgtttttggttatgagcccaaatacgctgggtcctaacgacgtgctgcgcgaggacaactatttcctgtgggaattcaactgccgcatggcactcgcgaggaaggacctgctggaccacgtggagatgaagccagaagatgcaggtaagtgggagaccgagacgtggaaagccgccgatttcaaggcgctggctgtcatctcgaagttactgagtccagtgtaccagccgatgatccgagaatccaagtctgccaaggatgcgtgggaaacgctgcgcgagttcttcgtcaggcagaatcttcacaaccgcgtccagcttcggaagcaactgcacgagttccaaatggcatctggggctgatttgatgggccacctactgaagttcgatgatctctgtctgcgactttcggctgttggtgaccagctgagcgacgacgagaagctcgtgattcttctggggagtttgtcgagctagtatgacgccatggtgaagattattgaggctcactcatccgtgactctgatggatgcgaaggagatgctgcgccgcgagtcggagacgctcaagaaacgcgagaagcaagaggaagcgtttaacgtgtctgcgcgtggtggaaatggaagcacaagacgacggaacaatgcagggtcacgcgggacccaggcaagccagcatggacatggaggcgggcggcatggaagccgtcgtggtggtggccagcagcgccaaccacgtggaggtcgtggagcgtcgaggtttgatgggcgatgctttgaatgtaaccagttcggccacaagcgtgcagagtgcccaacactcagtaagaaggacgacggagatgagtttgtgttcgccgcgacgagggaggcatcgatggcatggctgctggatagtggggccagcacgcacatgacgcacagccggcaagatttcgtggagttccgatagctgcagagcccgacggatattgtagtagccagcggacaacgcctacgcgcgatgggagtgggaactgtgcgcttcctgattggcggcggccggttgatcaaggtgactgaagtactgtatgttccggacctcgaccggagactgctgtcgattccgtcgttggtggccaagggtgcttctgtggagttctctggtaatgggtgcactatcagttttgaagggagattggttgcgcgtgtggagaagggggaaaattatttgtctggaacgtggtggcgacgacggatgaggagcgcggcaaggacgttgcagcatcggcggagctgtcgcctggcagcttgtggcacgagcggctggggcatgtgtcgaagaagaagatgatgttggtgtcgcgcgctgcggagggcgttccgagctttggtcaagatgatgatgtcccagttgacgtaccctgtgctggctgttcgtgtggcaagatgactgtgagcccgttcgcaagacagtccggcagtagtgtgaagaccgcaggattgctggacctcgtacactccgacgtcatgggtccaatgaagcctcagtcgaaagggggagcgcgtttcgtagtgacgtttgtcgatgattattctcgctacgtgcacatgtatctgatcaaggcgaagtcggaggtatttgctcggttggtggagtacaaggcgctcgtggaagcgcagaccggtcgtcgtattcgctgcttgcgcagtgataacggaggagagtctgtgaacaagaagtttggggactttttcgcggctcatgggatcgtgcaccagacctccacgcttcacactccgcagcaaaacggtctcgctgagcgtatgaaccgcacgctggttgagatggcacgctcaatgttgtaccaccgcggaatggctcgtgagtggtggggtgaagctctgagtacggctgtgtatttgacgaaccgcgtaccgaacactgctcgccctcaaactactccccatgaagttttcgccggacacaagcctgacctgagctacctgcgagtcttcggaccgagagggtacgttcacgttgacaagtcacgtcggagcaagtgggatgcccgagctcacgcatgcatctttctcgagtacgctcctggctcgaaggcctatcgcgtttgggatgctaaagatgagcgcatcgtgactaccaggaccatcaccttgaatgagcgtcctgctgacaactatcgcactgtggttcacgtgacgaggcaggctccgttgcagttcgacgaggatgtgagtacctcgcagcagccacaacaaccggttttgcctgcgacggacaacagcggagacgttgaaatgaccgaggtcgatggtgatcccgtcgacatggaagtcgatgcagtaccagacgcactggttcgccgtggcgaaggtgagatgtctcgcagagggggagaagcacttgaaatcccagtttcagagccgagctcgaacgttacagctgctcgacaactcaccagccagtcctctctacgtcaatcagctctgattccatcgtccatgcgcactggtgaaacctcgctgagcgatcgcctcgtgtttggcccaactagacctcgtcaagttcgtatttcggcgccccaccaaccgcgtctgctgacaagtgctcaagaagcaagaaccccgtcattgccagcgctaccaccgagtgaaggcaatagagagactggggaagccgaacgactgctgctggagaatggcgaaaccgatccgacaagtggacaagatgcgacgggagatggctacacttcggacggaagcattggtgagccggacagcaagcgcccgagaattgacgacgagtacgagattgctcttgctgcctcggaacgtattcccaactcgttccgtgaagcgatgcgttctgccgactcggacaagtggaaggaggcgtgtcgcgctgaaatccgagctcatgtgcgcaaccacacttgggatttagtttaccgtccgcccggtgttcgagtgatcgggcacaagtgggtctttgcccttaaacgcgatgaacacggaaacattatccggtacaaggcgcgtttagttgctctcggttgcttccagacgtatggtgttgactacacatctacctactctcctgttgccagtctcaacacggtgcggatttttcttgcggtgtgctgccagctcggatacatggtgaaccagtacgatgttgaaacggcctttctaaacggcgacctcgaagaggaattgtacatggtgccgcctgagtgtctcaatgttcgtgaaggcatgtgtgtcgccttcgtcgcagtctctatggcttaaagcaagccgctgctgtgtggcacaagaccattcgaagtgtgttcatcgccctgggattcaagcagtgcaagtcggatccctgcctgttcgttcgagttcgtcacaatggacccgttttcatcgtcctgtatgtcgatgatctgcttatcggatgtgcggccgaagaagaggcgtcgagtattgcagaggcattgggtgcgcgttttagtctcaagtcacttggagatgctcgctttattctcggaattgagcttcgctacatcacgcagcgtggagagcttttcgtttgtcaggcgcaatacatttcgcgaatcattgagcgatttggccaagcagaggctcaccctgtccgaaacccgagcgtcgtcgggcaaaatctgcgtgcaagtgacgaacacgcaaggatgaacgagaaaaagccatttcgcgaacttgttggctcacttctctacgttgctaatgcaacctggcccgacatttgtgttgcagtcagcattctatcacaacacctcgaggatccacgtgaaatgcattggaaggcggctgtgcgcgtgctacggtacctcaagggtacactcgctactggtgttaagtattggcgcggaactcagctgcgtttgctcgccttcagcgatgcaaactggggaagcgatctatctactcgccgatcgacatcaggcgtgcttctgcagccgtgtggtggaccagtcgtgttcaaggcgaagaaacaggcgaccgtcgcgctatcttcggccgaagccgagtacatggcgcttgcggtgacggtgcaggaagtgatgtgggtgcggcagctgctcggagagaagctggtgggagatacgtgtgctactaaagtcttcatcgataacaaggcagcgatcagcatggcgagcaacagcgggtacaccccacgcgccaagcacatcgacctccgcgtgcacttcgttcgtgatcaagtcgaaaaaggaacgatcaaggtccagcatgtgcgctctgctcaacaactggcagacaaccttaccaagccactcccgactccgcagttcatgatactggtgaaggcaagtggcgttgtcagcagcggcgatcctggaatgcaagttgagggggagtgttgagctgcagcaccacgtcacagattttcatacccgacactcacacacacttaaggggtataattatgtgctgtacacaagggcaacttgcgggttgcagagagtgatggtcgtcgaagcttcgcgaagcgctgatcaagtttgtcagggttctagattgtaggaactagagcgagctgctaaggtctcgtaggtaaagcttttgattcaatctcactttccattctacactgcatcgcaaaagaagagttcaagtcgtttttggttatgagcccaaatacgctgggtcctaacgacgtgctgcgcgaggacaactatttcctgtgggaattcaactgccgcatggcactcgcgaggaaggacctgctggaccacgtggagatgaagccagaagatgcaggtaagtgggagaccgagacgtggaaagccgccgatttcaaggcgctggctgtcatctcgaagttactgagtccagtgtaccagccgatgatccgagaatccaagtctgccaaggatgcgtgggaaacgctgcgcgagttcttcgtcaggcagaatcttcacaaccgcgtccagcttcggaagcaactgcacgagttccaaatggcatctggggctgatttgatgggccacctactgaagttcgatgatctctgtctgcgactttcggctgttggtgaccagctgagcgacgacgagaagctcgtgattcttctggggagtttgtcgagctagtatgacgccatggtgaagattattgaggctcactcatccgtgactctgatggatgcgaaggagatgctgcgccgcgagtcggagacgctcaagaaacgcgagaagcaagaggaagcgtttaacgtgtctgcgcgtggtggaaatggaagcacaagacgacggaacaatgcagggtcacgcgggacccaggcaagccagcatggacatggaggcgggcggcatggaagccgtcgtggtggtggccagcagcgccaaccacgtggaggtcgtggagcgtcgaggtttgatgggcgatgctttgaatgtaaccagttcggccacaagcgtgcagagtgcccaacactcagtaagaaggacgacggagatgagtttgtgttcgccgcgacgagggaggcatcgatggcatggctgctggatagtggggccagcacgcacatgacgcacagccggcaagatttcgtggagttccgatagctgcagagcccgacggatattgtagtagccagcggacaacgcctacgcgcgatgggagtgggaactgtgcgcttcctgattggcggcggccggttgatcaaggtgactgaagtactgtatgttccggacctcgaccggagactgctgtcgattccgtcgttggtggccaagggtgcttctgtggagttctctggtaatgggtgcactatcagttttgaagggagattggttgcgcgtgtggagaagggggaaaattatttgtctggaacgtggtggcgacgacggatgaggagcgcggcaaggacgttgcagcatcggcggagctgtcgcctggcagcttgtggcacgagcggctggggcatgtgtcgaagaagaagatgatgttggtgtcgcgcgctgcggagggcgttccgagctttggtcaagatgatgatgtcccagttgacgtaccctgtgctggctgttcgtgtggcaagatgactgtgagcccgttcgcaagacagtccggcagtagtgtgaagaccgcaggattgctggacctcgtacactccgacgtcatgggtccaatgaagcctcagtcgaaagggggagcgcgtttcgtagtgacgtttgtcgatgattattctcgctacgtgcacatgtatctgatcaaggcgaagtcggaggtatttgctcggttggtggagtacaaggcgctcgtggaagcgcagaccggtcgtcgtattcgctgcttgcgcagtgataacggaggagagtctgtgaacaagaagtttggggactttttcgcggctcatgggatcgtgcaccagacctccacgcttcacactccgcagcaaaacggtctcgctgagcgtatgaaccgcacgctggttgagatggcacgctcaatgttgtaccaccgcggaatggctcgtgagtggtggggtgaagctctgagtacggctgtgtatttgacgaaccgcgtaccgaacactgctcgccctcaaactactccccatgaagttttcgccggacacaagcctgacctgagctacctgcgagtcttcggaccgagagggtacgttcacgttgacaagtcacgtcggagcaagtgggatgcccgagctcacgcatgcatctttctcgagtacgctcctggctcgaaggcctatcgcgtttgggatgctaaagatgagcgcatcgtgactaccaggaccatcaccttgaatgagcgtcctgctgacaactatcgcactgtggttcacgtgacgaggcaggctccgttgcagttcgacgaggatgtgagtacctcgcagcagccacaacaaccggttttgcctgcgacggacaacagcggagacgttgaaatgaccgaggtcgatggtgatcccgtcgacatggaagtcgatgcagtaccagacgcactggttcgccgtggcgaaggtgagatgtctcgcagagggggagaagcacttgaaatcccagtttcagagccgagctcgaacgttacagctgctcgacaactcaccagccagtcctctctacgtcaatcagctctgattccatcgtccatgcgcactggtgaaacctcgctgagcgatcgcctcgtgtttggcccaactagacctcgtcaagttcgtatttcggcgccccaccaaccgcgtctgctgacaagtgctcaagaagcaagaaccccgtcattgccagcgctaccaccgagtgaaggcaatagagagactggggaagccgaacgactgctgctggagaatggcgaaaccgatccgacaagtggacaagatgcgacgggagatggctacacttcggacggaagcattggtgagccggacagcaagcgcccgagaattgacgacgagtacgagattgctcttgctgcctcggaacgtattcccaactcgttccgtgaagcgatgcgttctgccgactcggacaagtggaaggaggcgtgtcgcgctgaaatccgagctcatgtgcgcaaccacacttgggatttagtttaccgtccgcccggtgttcgagtgatcgggcacaagtgggtctttgcccttaaacgcgatgaacacggaaacattatccggtacaaggcgcgtttagttgctctcggttgcttccagacgtatggtgttgactacacatctacctactctcctgttgccagtctcaacacggtgcggatttttcttgcggtgtgctgccagctcggatacatggtgaaccagtacgatgttgaaacggcctttctaaacggcgacctcgaagaggaattgtacatggtgccgcctgagtgtctcaatgtttgtgaaggcatgtgtgtcgccttcgtcgcagtctctatggcttaaagcaagccgctgctgtgtggcacaagaccattcgaagtgtgttcatcgccctgggattcaagcagtgcaagtcggatccctgcctgttcgttcgagttcgtcacaatggacccgttttcatcgtcctgtatgtcgatgatctgcttatcggatgtgcggccgaagaagaggcgtcgagtattgcagaggcattgggtgcgcgttttagtctcaagtcacttggagatgctcgctttattctcggaattgagcttcgctacatcacgcagcgtggagagcttttcgtttgtcaggcgcaatacatttcgcgaatcattgagcgatttggccaagcagaggctcaccctgtccgaaacccgagcgtcgtcgggcaaaatctgcgtgcaagtgacgaacacgcaaggatgaacgagaaaaagccatttcgcgaacttgttggctcacttctctacgttgctaatgcaacctggcccgacatttgtgttgcagtcagcattctatcacaacacctcgaggatccacgtgaaatgcattggaaggcggctgtgcgcgtgctacggtacctcaagggtacactcgctactggtgttaagtattggcgcggaactcagctgcgtttgctcgccttcagcgatgcaaactggggaagcgatctatctactcgccgatcgacatcaggcgtgcttctgcagccgtgtggtggaccagtcgtgttcaaggcgaagaaacaggcgaccgtcgcgctatcttcggccgaagccgagtacatggcgcttgcggtgacggtgcaggaagtgatgtgggtgcggcagctgctcggagagaagctggtgggagatacgtgtgctactaaagtcttcatcgataacaaggcagcgatcagcatggcgagcaacagcgggtacaccccacgcgccaagcacatcgacctccgcgtgcacttcgttcgtgatcaagtcgaaaaaggaacgatcaaggtccagcatgtgcgctctgctcaacaactggcagacaaccttaccaagccactcccgactccgcagttcatgatactggtgaaggcaagtggcgttgtcagcagcggcgatcctggaatgcaagttgagggggagtgttgagctgcagcaccacgtcacagattttcatacccgacactcacacacacttaaggggtataattatgtgctgtacacaagggcaacttgcgggttgcagagagtgatggtcgtcgaagcttcgcgaagcgctgatcaagtttgtcagggttctagattgtaggaactagagcgagctgctaaggtctcgtaggtaaagcttttgattcaatctcactttccattctacactgcatcgcaaaagaagagttcaagtcgtttttttattttttcgggtgccctgaagaatcgactaaatgaataaacgctcgcgatacgatcaccgtaggcggggatgcagcagtgcgcgtctccgtgagtaggtagccaactaaaccgcaacaaattcaaagatgaacgctcgcgagttgctagaatcacacgcaagttgcataaaaacgaaaagataacagcaatgcatttctgtaaaaaatatctatctacgcaaacatccagtattcttccgctctgtagcgcacgacaacttgaaccagccgagacagtttgtgacggcttagcacgagacgccgctgggctcgccgctgcagcttcccgtggagcccgacacgtcgatacccgaaaacgtccagcccgaagcatacttggagttcaccaggatgtcgtacacctgatccgccgagccagtcagaccgttgatgtaatatccttgatcgtcaccttgctgctggccgtgccggtgtacccgcccttggacttgctgtagtcgccgtggatcacgatggcgttctcgacgttcgacagcgtgttgctcgtgtacgtcacgtcctccaccgttccgtagtcgtcgatgatggtcttgatgcggataccgttgacgctgttgatgatcttgttgttcttgaccgtcagacccgagaccgtgtccgaagagctgacggaggacccaccgatggagccgatagagatgccgtgtccgccactgcaggtgttgctggagaagaccgtgttggtgctggactgcatggcgaggcagtcgtcctggttgtagatggtgttgcctgagatcgtgacgtccgtgttcttgctcaggtcgaagccgtccgtgttcttagcagtgtcgtcacccgcactcgagtcgagcgtgaggccgctcacagtcgtgggctgcgagttgataatgctaaaggtgcggtagggcgagttcttgatcttgaagcccttgaccgtggacgagatgaccttgctcatgcggaagaagacggggcgagtgatagacgtgccctgcttccagtaccaggcgccctggccgtctagagttcccgttccgctcaccgtgaggtccgtaccagtgagaagcacaaggggtcccgaccatatctgtggagaagatacagcacgatatcgttagcgtggggtgcacaactacaacccacccatttaactgtcaaaatggacgcaccttttcaccaaacgtggtggtgccggagaagacgacgctagcgcccgacttgaggtcgctcaagtccagcgtgacaccagcggggacggtcaacgacttgatggtgacggtactgcacgacgacacatcggtgccgctcctgtaggtgcccgtgagcgtgcagctactggcctactcctcttgacgcatcatgggcgagccgcagaccatggtaatcacgagcgcagcgctggcgaggagggggaagaagaacttcatggcttgaagaggttggagtggatggagcttgagcagactcgagtgaattccggaatgagcttcggagtcgggttgctccaaggtggtgccatgacagagcgacaggaagtacgttgaagacgtggtggctgttctcaagcggggacggagctaacggtgtccgaacggacaagcggacaaatgatatgtaaacgccaagagccttgaagctcgtcaaccaccgcggacggcgatctgcttggagcgggggccccctacgtacgcgtcggccgatccatctggacgtggtcaacgcagcgaaggagtgcactcgccatcatagcggccggggtggcggggttagtacatgcagtacgcagtcttccagccacgaagttggggtcacttccatgagatatgcagggaggaatgcaatgagttctcttgaggtctggtgctcatcgctttgtgcttggtaatcggtatcgatttgctgatagagcttgcaccagagagcctccacacgagacttggtggaggccagaagccatcctcaccgcagcatctcgctaatcgagccactcaatgctggaaagggtgctttcgctagacgcgccaagatgacgatctgacgacgaatttgtcagaacatcttgatgaccacaacgcgacgatcgagatagcgaaggagcagcccgccccggacggtaaacaccgaggcccctcgattgcacttcaacgctgacatgtgagctcggggcactcgattcctatcagattgggtggcaaacctcttgctcgccagcaggcggtagcttgctacagaatagtaccgtaataccagtagtaccgccctgcccaaactcctcgtgagttcgtctccgctgcgcgatcgaaaatcttgatggcgatcgtccagcactacatgtactaggccgaccactttgctgcaggagagtaccggctcagcatgcttacgcttctagaaaatgcttttgcgtgtattcttccattcacctgcaggagtcctatcagcatggagtccacacactacggagaacgcacacgttgttgtatctgatactgttgtaaacgagaactttattctgcacagtgtttttttaaaagacgaacatcgaccgcccaattgacgtctcctctagcctactgagcacggcacgggggtaaggttttaaacaggtctggtcctgttttggtcctacgacatctaaacgagaccgaacagaaaatcgttatgatttcgctaccggtcccgtttggatggcgagacccaaatgatatcactacgaaaccagccatttttagacccccttcactctgatacaaaatatcgtgatagatgatagagggcatttgctattgaagtaatgctggagattacaacacaaatgtctgaaatgtgcgaacgagcgtcttgctgatgtcgatcgctggatcgtcgacgctgctcggactatgcgatgttgctagacttcctaaatgagcttccacgaactcaggcgtcctcgtgcctgaatctactgctatcttcgtgcatgtattcttgtctgcatgtaccactgatccttggtacttggtacttgaagtacttgattgtattctgcctctgcaggaaattagagtatccttaatcccttcacggcaatccgttgcattctgcttgcttcgcccgaatacttgccatttccttcaatacgacatcgtagggggcaatcgaggagttcagtttggatatgagccgaggcttgaactgcacggcaaatcagggctgtgaagactagcccccttgatagacggctcatgctaaggtaatgttcgataatccccttgctttgtcgtggttgcttttccgtgttggcactagaattcgagtttgcttgactggttgtttggtgctgttcactgcgaggctgatggctgcaaacggaccggtctgagtagtggtttgtttagctgcaatatgtcgactgttgtatggtcaagttggccgttgatatccgtggtaatgatgagctcagtccccaaataaaagacagtctcgacactgacgcgaatcttgtgaaggcgcacttccacctagcttttggtgaccgtgctattgataagatgctgatgtgctgtttgaaggcgctgttagagctgggtctgacttcatgctggtgtggcgagtattcggacgaagcaagcggaacacaacaaagtgcagtgaagagaaacataggtggaaggctactggggtttcctgtagaggcagagtacaacagcagacagcagtagcgagagttcgttttaggaagagtagcggtagcacacagacacagcgaccagcgttagtgatcgagcgatcgacatacagctgggcgctagctcgcaactcgcccaccacattccatggggccagtctctcacagccctgcttcgcagagcacttcaagcctctgcccctactcaaaatttacttctcgattgccccctttgatgccgcaaatgaaggaaaaccacaattggtctggcctatatgcatatagtggtagctgtggggccgaagatcgacgtcgacttcttctcgtatgctttggctgctggtggctgacgttcggcctggtgagagtggatggtatcctgtgaagcttgctggccaaaatttggcaccatttggacgcttcgcttgtgttggggtgcccatggtgactgcgttgcggcctcatgtgagtcgcctgtaagacggtgttggtaccgtggagagactgttggtgctgacggatccgccgagtgtgaactctatcgtttggctgaatcattaacacgcgggggcaggggtgttcatcaagtcggacgacccgggcagctagagtacaagccgggttagcataacttacagttaaccgttgacagcagaggttttgtccagtatggtttttcatgcaatatcccctttaatacataatacatctattttccgtttgcatatttgattatagcgtttttccaaaacccggttttgtgtagtgtcttttttaggtcccatttggaggctaattttatttcggtcttgttttggtcctacggaccaaaaaagaccagacctgcataagacctgtttaaaaatcttccgaaacgggtactttgaccgtaaacaaaactgcttgaagaatccacttccgtccttgcttagcagtccacgctactcggttcgccgctgcagcttcccgtcgagcccgagacatcaatacccgagaaggtccagccagacacgtacttggagttcacgaggatgtcgtagatctggtccgccgaacccgtgaggccatcgatcgtgatgtccgtgacgtaaaccttgttgctggccgtgccggtgtagccgcccttggacttgctgtagtcgccgtggatcacaatggcgttctcgacgttcgacagcgtgttgtccgtgtaagtgacgtccgtcaccttgcccgtcagatcgatgatggtcttgatgcggataccgttgacgctgtccacgatcttgttgttcttgaccgtcagacccgacaccgtgtccgacgaactaatcgaagagccgccaatggagccgatggagatgccgtgaccgccgctgcaggtgttgctggagaagaccgtgttggtactcgactgcatagcgagacagtcgtcctggttgtagatcttgcagccggtgatggtcacgcccgtgttcttgctgaggtcaaagccgtccgtgttcttggccgtgccgtcgccagcgctcgagtcgagcgtcagaccgctgatggtcgtggactgcgagctcagaatgctgaaggtgcggtagggcgagttcttgatggtgaagcccttgaccgtggacgagatgaccttgctcatgcggaagaagacggggcgagtgatagacgtgtcctgcttccagtaccaagctccctggccgtccagagatcccgtaccgctgacagtcagcttggtacccgtgaggaggacgagaggtcccgaccacttcttcgtgccgaaggtggtggtgcccgagaacacaacgttggcgcccgacttgaggtcggtcaggtccagcgtgactccagcggggaccgtcgcgacttgatggtgaccgtactacatccgtgccgctcgtgtaggtgcccgtgagcgtgcagctgctggactcggctccttccgcctcctggcggatcatggggctaccggtgacggcggcgagcaccagggcggcggcggcgaggacaggcgtagcgaacttcatggcggagggaggagctgcgggtgaggacggctgtcgcttgatgcacacgaaggaaattcgggaatgaaccgaggtcagctacggaaatcggaggcctttgatccctcaacgtttacctgcagccacagtgccatgccgattccttgcccatccaggccggctcacacgtcgggctgttagcccagagcaccctgcgtgatctccacctcgtgacctgcagacagcggaatgcctcaacgctcgcgatctgccgggagctccatctcatatgccggagcgcatcggcattgccatctgcaggcgcctcgacgaccaccacggacacgtaatcacgctgccacgggcgcctctactgtcgataacaacccgctcctcacatatcgcgccgtcacatgcgcgttgacgccaccaacgtgcgctgcatccagcaggcgccactagagatccacagtcgatgcagcccgggctggtggagaatcggcggaaggctgtaaaagtcgcctaagtcttcacaccgacaatttcgcgtcggtagtcgatttaatctgcatttcgctagctgagcgaccacctcaaaagctgccccggagatgccgttcgttcgcaggagcgtgaatgagtcgggcggagctttcacggatcccagctggcgggctcaagtgaatgctcggcccactctcgtctacaacttgcagtcagaccacgccaagcgcagcaaactgcaccaaggattcgaagtcatcaaaaactgaatacattgcccggctcatgcgtgctacgtgaacagcggctccagctccgccgtggtgttcgctgtcactgcgagccgcaccactgctccgagcagcgtgtctagactctgccactcgcccgccaacgccagctccttctgcatccgctcaatctctcgaaggtcctcgacatgcgcagtctgctctgcgatcccgtccctatctacgtgaaaccccgccacgcctcggaacttcccagcgagcgacggccccaacttcgctgtgagcagctcgtgcagcccgccaaactcgaacaagtcgggcgttccgatggccactccgtccacgacgctggtcgaattgcccccactcccatcgccctgctctcgacggaatctctccagcacgacgcgccccaccacgtcatccaccctcatctcgtgcagctttgggtcgttcttctccaccagcttaacgatcgcttcctctagaaacgccaagaacgggtggcccggcggagcctgcatcacgtgtagccccaggctgagcctgccgctgctgctactcgcctgactggccaccacgagcggcgcctgcatgtccacgtggatgcctctcagcaggaacgtgttgaagtccgagagcgccacgccgccgtgcttctggagcgcgcgcagcatcagcagcagctccgtgatgcggcggcgcttgtgtcggggcagcgaggcgtcaaacgccacggggggcagcacctggtgcagcccgagatggcgctggcactgcgtgtaccagacgccgcgcggcggcgcgtccgggtagtgcatcatcatcacgtcgggccgcagcgcgcgcctgacggactgcagcgccgcgaactgcaggtacgtgaactgctccctctttgctgggtcctcctcggctgcgtcccagtcctgcgccacgtggacgaagtgtacgagacgtaattgactcctacttttaggcggctctacggcggctcggaggccgcagcgcgcctgcagctggcgcagtgcgtcgggccgcaggaagtcggcgctggccacggagagacacgcgggcacgggctccgatgacggcgggcggaggtgggagcgccgctcgagggacgccacgcgctggaagtcgaaggtggccacgtggtagacggccagcgggatgagcacgaagatgacgacgacaagcagcagcacgggccgcagactcggccgccgtaacctccgcagggagcgcggacccattttgatcggtactaatcccaagtctctaatcttttagtggccatttcacaacagccaagttaaagttgatccttacacagagaaatgtcactgttagggtgcaaagtttcgcatttttagtagggtaattaattcctaatcttaccagtggtaagttaccaccgcgtggacgcggcaaacctgtcgagctttggtgacaagctaagaattccgtccttaggagaccgaaccatgaagccgcagatactgagcggcgtacagcttccacgccgtccattcagcgccagtcctggagaggctcgggtacccgttcagaatgctcgcgacgtctagaggagacaattgacgtgttctcaattctcgtcaagatgtctcggtcgtagctgctaagatgaacaaacatgttggactcagccgcctccatgtccgcgagaatgtcatcgactgttttcaactggatgcttctctcctcttccgagtcctcctcactctcgtccttctcttcttcgaccgtcttgacgcctctcaggaatcgcgtcaacttcccggaaatagagtcgaccgactgcaccgcgtccgcggcagtcaccttcggtagctgcgtctgcttcaactcagtggcagcggcggcagtgttgcagctcgcaaggagagcggcagcggcagtaaggagaatgggattcagacgcatggtcgatcttggacgcttgggcgttggcttggggcttgcggcgcatattgcacggtgcgtgttgaggacgactaaggtggtcggttgggctccatgctagggccatgccctacaggctgcaagcttgtaggctacagttttagctaaatcctccgagacgacgagggcgtatccaggatgatgccggcaactgtacatgttcccggcaccacgcgaaaaattacagtcgttgagaataggtttgactaaagttaatatctgagctgcgagtgtagcagtccagcaaggagaccattgcagttagtacattaagctttgtaagttaggatcattcctaatgaatctcatctcaagttattgctgaatattaaatttaacatggaaactctggcgcagctttataaaacctcctttgcagaagttcgtacaataactatcactccggcaaattagagtacatatatgatcgtattcgcttcgtggtacacgtctatgatgcaaatgtgttcgttgcccaaggcggaaaccaataacccaaatcgctttgagtccgcagtcggagcacgcgtcaactttaatccaaggatgcaattccaggatggtgagcgtgtaaacggctcaactcgagagagtcaacttcaattttagtcaacttgaattaaaaaaatggatgcaattccaggctggtgaatgcgtaaacggctcaacgcgagcgtgtcaacttcaacactaagtacacaaatcgagatgctacatgtactccaggtataaacgactcaacacgcgcaccgcccctggacctacctgctgggaaacacagtagtgctatatggggtctccttacatggaagtgatagttactttttttccaatcctgtggattctacaaggtgagctcattcatcacttctggagccctcaaaagtggtgcagatgatggcggcgatttccacagcaaagcaacgaaaagagcactactgtagagactacggtgacttcggagtcttgttgatgtcgaattcctgcgagtgttgtgcgttaaggtaacaccgataggcagacctccaccaatacgggaatttcagaaattttcccgtatttcccatatcttggcgatcactgaatatgggagaaatttgaggcttctcatagtaaaaacgtcgattggagtgctttgttggagctatccacctgagttaatagcctgataacgttgctgtatatgttgctgttgtgttctggaacttgctgtttgattatagcaagttgtgccagttacttgcatcaattttatcttatttgtcgtgcttagttacgtgattcattcttgtgtactagtatctgcaagcaatccgctcaacgcacgtatccactattttgtctacgaaggcaataaagacattataagcaagcgcattttcgattaaagcgacttgtgttttgcatatacaggagcagagggtccgtaagaaaaaaatactagcatgcaagcctaaaggtcttattcactgcataaggcaggtatttgttatttttgcagccctctctcgcttgctcggacagtatcgaataacacaagtcgaccacaccaccagcaaacgctggatacatcaaaagcagcaaacgctgaatacatcaaaacatgtaaacttgccagcactttttagacggaaacctctcacttctctagcgaaatctcgtacctgatggtatttttaccgtattagtttccgcacaccacgatcctgccggttcagcgacaatttgagatcaagtttgtttaacgtaaaaaaatatgtagataggaaatcacaaacaaattgacacaagtgtacctatcatcagcctctgtcactgccactccagcccccagtgttatacaactcaaggactgcactacaaagccttcgtgaagcttctacgatgttactgtaccttcattagcgacgttctgcggggtagacatatttttcgtaattttgactaatactgcaattattgggtccaatttcttacaattgagcatcaaatagcttcggaaacctgagcgaatgcttcgtaaaccaatttggtggttaactattcgatccattaggtatgcagtagttatttgacttctctttagctgcataagtatactattacatattttgctcatcatcatattttctgaaaaagtgggaaaattgatcttttctgtattagtagaggtggtagaaggtctcgaagctctgcatcacgtagaagtagcgagcgctgaggtatctgggctcgtccatctgtgacttgcagctcgttaacatattccgtgttatttttaagatttgttttcgccgagactatcattagacttcaacttgcagctaatcgcatccaaaagctcgtgcttagctcaagactatcacaggtcgaatgccctcgcccgacaagctggttcaattgcaaaatgtctacgcagtctcgcctgggaaagcgcgcgtactcacgaccaatccctccccgacgaggaagcgccaacctggaacgtcggggctcagttctttgcgcagacctaaaggggtgaatgcgccgcgcgacagcttgtccccacagcaatggaagaagtggatgcacgaagcgtgcgagctcaacgtgtcttcgtcggcatttctggccagtacatcgactgagagcttagtgcacacagttgaagatgggttccagcttgttttgagcccggcagtggcacgaacagacgagcgactcgtgaggttgatcgaggatcaagcaaaaaacaatgtggaggcaacatttaataagtttgtggcaaaacatccgtctgcatcgagcccgatcgagcagtggagagctcgagtcactaagcccagaaagaggaggaagagtacgagcctcagaatcgagccgttgctatccgacgaggtatgttcacacagtgtggtgggattattgcttgtaagttatcctaacatttactgctgaatctacaaatttcaacagatacgggcgaagctccaggcccacttggaagagaagatcaagggcaacatttgggaaaatgagatccgctctcgacttgccagacccctcagcgcctccaccttctgcagcagaagtgagcagctccgacacccactcagcacggtccagttcattgctgctcaaactgcaccatcagccgaagtgtcaactccagtgaccccaaagttcccgtactcagtggaagcgcacgcatttgccgactgtatccgtcggtgccggttgaaggcctggtttagagacgctctcaagtctcgggcaagagttctcgccattgccatccgcgtgcttcgtcgtcgaggcgttcctcagctcgtacaaggctttcgtcgacgccgccgcgccgccattcggatacagcgacgctatcgtcgtttccaacggtggcgtgaggaaatattacgtccattcgtctgcaagaacgtcgcgctatgggtgcggcgcgcgctggtgttggcgtccgtgcgcgtcctaatcgctcgtgcgattacagcgttatatctagcgcgaatggtgcggcgagagcaggctgcgcgccgggcagcgcacctgcggcggtgggctgccaaaacacgcgtgtgtctattcgtccaccagctctggatgatggcttggttcaggggtaaacgcagtcttaacgtggaaggaatgaagcaggagctggcgtcgctcgggtccagcgaccacaacgtgcatctcgagtacactgccatcttcgcgacgcctctgggcaaggacatgctgaagaaggagctcgcccggtggcgcgttgcggcccagagcagagcagcgcaaagcgcatcaaacacacgaagaaactcgaatgcctcagaactggacgtcgtcgatccagcaatactgcgactgcgtcaatgcttccagatcttcgacctggacggctctggtacgctagatctggacgagttccaattaatgttgtcgtatctgcgtggcaagaagccgaagcggggcagcgtcagcggccataagtccgccccacagccaccgaagctcactacagctcaagtgcgcaacctgttcgccgagttggactgcgacggcaacggtggcattacgtgcaatgagtttgaggactggtgggccaaagagcacaacaagacggcattgtccacgtcggcctccaccaacttcctgtctcgagggctcgacggactgctgctccaaagccacggcctgctcttctggctgcttggacgcaagcaacagttggagcggaagttcgtcaagaagctcatggtgcgtcgtgctatggagagcgccaagcgggagattctacaccgggagatcgaccgagagcgtgtcgctggggtgaactgcggcgtgtttcggtgccgtagttgcggccgtcggtttggattaaggagagatttagaggaccatgttgcgcacgactgctcttcaacgacgctagtggtggacacgttcacgttgaagcgctgggtgcaccaggaagagttccgattgctggaagataccaagacttgagtatgaaatctatgtcagcgccattatgagttgcgagggtatcacgacaactcacataactccaagtcaagctctgtcagcgaaatggatgagccggtatatcaggcctctccggcggtggagacttcatcgagaccgtgatgtgcaggtctgtagacgtcgggccttgttggatgcgcgcggaccttggaaccggcttgacctggtcggggtctcagtgaatgcacacgccaagtcgccgtcggcgtccaaacagtgtccaagcattcgacttgttttgagacgtccccgtgtgtaagcaccgcttcattggttgagacggcggcaattccggggtcctatctcaagtaccgcacagaggttgggggttgtcggctcaaagactggtcgagctggcatagctttcgcgctgttcgggtagtcgggctctttagtcctatttaatcggcgacctacggggatgcgtgcataacatcgtgatgagcccatctcattccgttctcggccctcgacaacttgtcgagggccttgtcggacaaggtcgcagccaagtcccgcacgcagcactgtacagcgcgagggaacgttgagcaacatatatggccgcccatgctgccgatgcgaccacgagatgtgggatactggggccagtgttcttgctatgctgcgctgcttggtctacgagagaactcttgtgagaacgacgtgcacgttgaatggcaggctctgagtctctcagtcgaccaacagtgagactgtacttagcacgcagagcgtcattctcaaacttgctgagttctcgacaatcgcccggacttcttacggctgagtaacgatggcgaagtggtccagcctactggcgttgctgcccttgctcaccgtcataagcttccagggttgcgcagaagcctcgacgtccgttgggctcagcccctcaatgcattcaaggatcggctctacggcgtctgcagcgtcctcattagaagacgactcggacgattccgactcgagcgacctggatgtccaagctaggcattcggttgcggaggttcaatcgacctaccgcaactgggtgggccccattatcggcgcaccagaccgcggtgactcggcctgctaccggaaggcgcacatcatgaagacgtgtcctgtaggcttcaactgcaagcggaagacgtgcggaagacgtgctgggcccagtgcccgctctcgtatccggtgcagtgcggcatggagtgcattcgccagaacgacgactgcggctttgagtattactccaagacggtcaacgtggtgcagactgcgatctctattgccactatgggcctctacggcgagctcacagctctgaccaagacggtcgtcaacggcgcgctgtgcatccaatccatgatcggcaacgtcaagatgttcatcaagtacctcagcatggtcaaggtctacgatccgcagacgcccttcgacaagatcatgggcgtcttgtactcgacgagttacgccacgatcgacttccccgtcaccatcgccatgtgcttgggtctcccatacccggacgtgctcaaccctgcgagttggatgctggacactgtccagctccttcttggagagatcctcgaccacggagacaacatcatccgcggctgggaccgattccaggccttcctgcatcgcatcaacttcactcaaccgttggcggagctgaacgagacggacatttcgtccctcaagtctggaatggcctccgactcgacgtgcggcttcgagctcaagtgcatcaccgaccgcacgtgggtgactgtggcccgaatgaagcagcagaaccctggcatctctcaagcggagctgcgcatcgccatgtacgagtccgacctcgtgacgcgcgacatccccatcgtgaccaacaactgcatggagcagatgatcgccgagtcgagcgaggccaccgcctatcagacgcgtgacacgctgcgcaagacgctgggggtgatcgtggacgacctcatcgagaagggcaaaagcgataatggtacatccttgacggccaaagagtatctacgcgtcgtgacggacaaggtcgccatgacgacgttcgtgctctccatcattgaccctacgcgcatcctaggtattgtgactgagtacatccagcccatctgcggccccacgcagttcatcggagagattgacgacggctcggacccgtacacgctcggtctcaatgcggtcgggaaggcgttcaagggcagcacttcgtcgtggactcgacagggcgacggcgttgtcactgttaacttcaacagtacggacacggaagctgtcgttgtgaatattttctccgcgggccacaagatcgacgagaagagagtcccagcaggaggcaccgccacttggacctcgaaagggtaaaacccggttgggatcatatagggtacagatcagagaatggatcggtttttaatactaatttttgtattgaaaaacatacgtttcgacagtgagcggttgcgaggagcgtagccatagcaaacccgcgcggggtgcccgcgaagcagggccgcgcggtatttgcggaggcgggctcagcgacgagcattccagcgaacggacccgttgccgcaactcggagttagttttctttttgcgggggtctgggggtgcaacccccagaacaccttttagcacatcagatccaatctcagatctgtaccgtatatgaccccaactggaggttaccctcgaaagtgaccgcgttgggtgggaagtcgctctactttgaccgtggttgttgggtctacccggtacgggaggtggctctctgaagttctgggtgccgcgagcgagcgaaggcggcaatttggagctctcagtaaatttgaacgtaagttagttaaatcaccaaatactctaatactaaatctgcttccatgggcatcgcggtcaaaagagaatattctaagcttaaaagcgaatagagttcgaacaaagttgtgttctccgcaataatgtttgtgatattttctcagcacactaactcactgtaagtgcagtttgcaaacgcgtttgaatgttcgctgctttatcattagatgtcaaattacaaagtgcgtagtgaatctggctaacatgtttgtggagctagacattgtttaactatacattgagggctttaactaaaaacagttggagctctttttacttgtcgtaagctgacttgtacgcgaagttcttcatctttacaccaaccatgatctcttcaaactacgtagcactagattacttttttgtggtgtgtacatatatgtggaatatggatttgacaacaacagccctctcgaggagccattaatttgacaccctaacatgtttgcggggtacacaaacagtacgaaaatataggtaaaacaaaaaattaacatccttacaccggtaggcacgtactacatgtactaagcttacagttagtagagtgcgtagtagagtgcgtctgaagaaaaaccggccaggtgcttagttaaccttgtggttctgtttcaagaacgccgccaagtactggtagtacgtctgccactccggaccgttcttcttgacattagcccgcgtcaaaatcgacttcacttggataggcgtgagctcctccactttccactgcttgaacctatccagatctttgtcgatggacttgagcttggtcaagatggtttcgtccgccttcgacagtttggtggtggccttctcagaggctttcgcagccgccacgacttgtttctctggggccagcagcgggtggtgggaactttgatgttcttcaggctcatcattcgctctacttcttcttgttcgctttcatcgtccgcttcctctgtcctggcgcttcgcaggaatcgcgagctcgatacaggggcagcaccagccctcgagagctgggtctggctggactgcgtggcagcagtggcagtgtcgcagctgacgaggaatgtggccgcagtcactacgagaacggagctcagacgtatggcgtgtgcttggacgggtagcagttactggaggagcacgagatgtgggggctgtagagagaattaccgagtgaaggatggtggccgaattggtgactgttgcggggtgagacttgaggttgaagacgaagaagacttgagtaggaagatgaaaaagaagttgtgttgaatttaaagaaagtgtcggataccaggggtggcaccggagcctcgctccggtgccaaccattggtgtcctcttaaacatgatcaaacagaacttacagggtatatgtacccgtacacaaacttacagtgctagtacacagtttgtgatcttagccatattgtgctagattgggtattcatgccactatttgagatactaactttgacagcctctctgtgtccaaattgtggcatcttattatcccagctggtaaaccagaatttgaggcaacgaggatgaggagataagattttggggtaaaacgtttagcggtagggcattttccaggctctgcctccgctcagaatttgaggttagttctctgataggtttaagcatgtagtgagcaggcctaatgtaatggctttgagaaatccagcactgagagctcatttgcaaactttcaagctccagtcaaggtacactttctgtgttttattcggccctaacagtttattggatttaggagaggcaaatccagattccggtcagagattctgtggatgcttgtctgacgccgcagtcgggctagacctaaaaagcgaaacgtcttcacagttctcaaggactcggagtttggagatgtcgatctcatgctcagctcactgttatgacattatgtaatgttttggaagatgctaactttttgtgatttgtattgttacagatgcctcgtagtctccgtacatctgtgctttgtcagcaccaggaaatgctgccagaccgctattcgatgtgcggcttactgtcggtgagcaatgctctccaggtgagagatttcctcactcctgtgatgctgcgccccgtactggcccggcttactgctgtgaggcccgcggaggatcacggacacccacgttttcgcgcgtacactatggacgcgttgcagaagggtctgaagcggcttcgcaaacagctggtgtacctgaactccaagtccggtttcgcaagcaggcccaagcgacctggtgctatcgtccgcagccggaagcctgccttgctcattattgggcggcgcccaggtcagtgtgcaggcacatggcactgcattgctcgcgcctgggttcgcaacaagttcctgttcattgactcggatcggtatcattattttccgaaccgggaggagttgttaactagtttctttgagaagatcgacggtgtgtactccattgagaatgtttaggaacagaaagtttcctttttgtgtatatatatatatatatatatattctttagttacatctttagaataaatttcaattttttaaagaaatttggtatcttcttctttaactatttgatttagtcagtctttgtaatcttttgttgtgtagtgctttttagattcgcattttgttgtacatatatatatttctatagtggaagtttttaagattaaagatgattcttaaggttatttataataagatgtataaccattttatttgaaaacgttggttttatttaagattatttaattgttctgcgcgatgttgtatattttttaaggattgtgggatgcttggattcactactcttatgtattaaaattggttataatttggaaaccttatatttattgtaagttcggttagtaatatttaaagtgtatttgttttattttgatttttttgtaagttaactgttatttgattccgttgctgaaatttacttttaagtatgtgagattgttgctttaatattcctagtattgaaagtttttgtttggatatcgttcaagtgtgcgggtttttttattgtattttacctcttcgtcttcaggttacatagtgactgtcttagtttaagaaatgtgggcttttatagagactttgtgaagatatcggctaccatttctttggtgttgcagtatttgacttcaaattcttttctgtctactttctcttgtacaaaacagtagcgaatgtggatgtgcttgcttctaccatgtagttctgggttgtatgagagtttgatacaactttggttgtcctcatatacggtgatagcatttgggcttttgtggttcagctccaagaacagcaagttcaggaatatgagttcctgcatgcagtggcacagggctatgtattctgcctccgtagtggagagcacgactgtgtaatgctttctagattgccaggagatcgggctgccacacatgtatgtgatgtagcctccaacagatcgtctagtgtctggacagttggcatagtctgcgtcggaatacgccgtaaggtagtgttgcaggttgtactgcttcacgttctggattcctccgagggtaatacccagtttgcgagtaccgttgaggtatctaaggcctctcttaatagcattccagtgagccttaccagggttggttaggaattggctgacttctctcagaaagtatgccaggtcaggtcgagttcccaccctcaagtacatgaagctaccgactgcctctctgtacgggatcgctttcatctcgttcttctcagagtctgttttggggcacatatccaggcaaagctttatgctcttgtccgtgggagttgctactggctgtgcatcgaggtggttgaagcggtccagtactttggtagcgtacttctcttggtggaggaagatggatcggtttttgcgatcacgaacaatggaccaccccaaaaggtactggcttcaccaagatcagacattttaaagcgcttcttgagcgcgtctttaatgtggttgatgatgcgagtcgtcggtgcaataatgaggaggtcatcgacatagaccaagacatagcatgtctgaccgtcaatttctccgatgaagacacgctgatctttaatcagcttgtggaacttcatggttttgagaaatacacacagcgtgagataccagatgcggggagtttgctttaggccgtaaaggctcttgagcagtttgcacacgagatgttctttgcctcggacggtgaaaccttcaggttgttccgtgtagatttcttcatctaggtatccattaagaaacgctgtcttgacatccatttggtggatttctaggtcaagtagtgcggcgatcgtcaagagaaggcgtaagacttccatgcagatgacgggtgagaagatctcatcgtagtcaatgccatacttttggagaaaacctttaatgacaaggcgggctttatagcgatagatggtgccatcgcctttgtatttaacgacaaacacccatcgacacaggagtgccttccttccttttgggagagctgtgagaagccaagtgttattgtccattaaggacttgtattccgatcgggcagccgccttccagtggcgggcttcaggcaggttcattgcagcagaataggtctttggttctgaaatatgcctaatggccaacaatgtgtacatctgcgagaggtgcgctttgcgttcttcctggtcctcttcatcgttaagtagtgtctttgttgcatcaattcctgcatcaagatcagcgatttttgctttcttgctagaggtcgtgattgttcccgccgtgagcgcgtcagcagtgcgttttagcatgacagagagtggtggtagcgcctgtggtgttggtagggtgggtgcccgttcagttgtcgggttgagcacatttggggcagtggttggattaagaaactccagttgagggaattcatgttcccggaaagtgacatctctgctgtatataatgcggttctcttgggtgtcaaggagtccatatccctttttattggatgggatgcccaggtacatgcacttgcgagctctggcctcaaggttgtttcggtaaagttccggaatgtgggcgtaagccgtgcagccgaacaccttaatgtagtgagcggatggttgtttcttaaaccactttacatgaggtgtgatattgtccgtcacagagctaggtgtgatattgagtacgttggcaacgtgtttgatgcattcccccacagtacctgcggcaggttgccgtcaatgaggaaggctcttgtgcgctcaagtagagtgcgcatgcgcctctctgctactccattttgttgtggagtgtaggcgtttgtgaactgcgcatgggtgttgtatttctgaaagatgatacgacccagtttctcgtattctcgagcattgtcactttgcaagtatttgacttcgtcgtcgtgcaagttctcgtggtagtggatttcacccacttctgcacggaaaatgttctgggtcttcttcctaaagtcctcgtaggactcgtacaggtctgactttcgtttaaggatgtaaatgaacatgtaacgagtgtagtcatcaatgaaggtcaggaaatattgacatcctgagagtgttgggactggcaggggtcctgccgtgtctgtgtgaactttttcaagaggaaatttcgccctttcaacgatacgtttattgaatgggttacggtgggacttagcgtaagtgcaggacgagcagaagtagtcttgctttgggtcgacgttcgacagtcccatgtccgtgacggtgttcgccttagccagatcctgcataatgcggaagtcaggatggcccattcgtttgtgccataacagaacattgtccaacttacctgaggcggccacatgggcgccttcgtcagagttcattggtttggcttggaactggtagagggacttgccgtctccagtcttggcttcaaacttgatgtggtgggcaaagaacagcgctcacttcttggcgttggggaagttgatcttgaagtcatttccaaccgcttggcggacggagagcaggttacacttcagctcaggtgcagcacgtcgttgagaacaatgatccgctcctttcccttggtgtccttgatcttcagctccacatcaccagctcccttgattggaatttggtggtttccaccgaccgtgatggcctttcccgccattggcttgagtattttgaaccacttcgagctcgaggtgacatgacgggtacagccagagtcgacagtccacatgggattatggtcagactcaagagcagtgaggttcaccgcttcggtttcttggctgaggtccagtgtcgtgatggcgatgatgccgtagtcgctgttgtcctcatcgtcacggttgcggcggccatggtacttgttgcgtccttgggacctgctattgtcgttgcggtttccattgcgcggcccgcggttattattgcgagactggtttccgctgttgccagtgtagttgcccttgtaggggtggtggcgctgcgacgtttgttgctgtcgctggtgttgctgttgttgtgactgcggttcctggagtggctcagcgtggttgtcacgatggcagcaggtgcacttgagcgatgccgccagcgctgtatcctccttgggtggagccgccacgagcacttgctcaggggctgaggctggcatggctgtttcagcacgggtctcctgggattcttccccagcttgagaatgtagcgattgcgcgcaagttcgttctggaccttggtctcgatgttgcgcttgaggtcggcgcacggaatgtacttcttgctacccttccagactgctaggtcgggcttccagtccgtcggcagagaatgatacagatagagcgatttttgctcgtcgccgagcacgctgttggttgaatgagcggctgccgccattgcttcctccaggccgtagatgaatgaagtgaggtcgcttccttccttgtacttcagtgccatcaggtacgactggataaagtacgggtcgccgtggatggctgcatcctcgtacttgctacagagagtctgatagatctcatacgctgtagtcttttccttgaccatgaggacgtgttggtcgtcaatggtcttgatcagtaacgccttggctttcgcttccatgtggcgtagcttcttggcgctcagctgtcggctcttggccttcagcttctcagcttggtccaactcctgcttcttctggacagtgaaggacaggaccacgggaggtttttccttctccatgtccacatcgccgtcgtctccggccgaatcatccgagctgccatcagaggcctcacttgacgaggagtcttgtagcgagtcgggcttggccacaccgtggatgtccggatggcagaccgggtggagctcttcgtcttcgccgaggtcgacgtccgagtccccagcgtagtctgcttgagtgacgaagccgaggaggttcttgccgtcgagagctgcggagacacgggttttccagatgatgaaattcttgccgttcaggcgagaaaagtcgcggtcgttggcgggcgaggcttgcgtagggctcatgacctgttgcggggtgagacttgaggttgaagacgaagaagacttgagtaggaagatgaaaaagaagttgtgttgaatttaaagaaagtgtcggataccaggggtggcaccggagcctcgctccggtgccaaccattggtgtcctcttaaacatgatcaaacagaacttacagggtatatgtacccgtacacaaacttacagtgctagtacacagtttgtgatcttagccatattgtgctagattgggtatccatgccactatttgagatactaactttgacagcgacaaagcgcgtgagaccgtaacgcagcatttgatgtcacaccatcttgggatagcccacgctacggagacccaatcggaaagcacctgcactgtcgattctgtagtagtccagactctaccagaaaagagtctcttgagaagtgcacccgcatgcggtcgttgtgcttgctaaggtattttaataccgtagtttaaacaactactattattaacatgtaggtgctactgtactcgtaagcgagttactcgctgctgccttaggctccaaagtagctactgtacaccaaactcgttctcgaggcaaatacttcacaaatcgaaccggccaggtatttgtgtcaaagaacaagccccccccacgaagtttgacctactgtatacttcaagtacaatttttggacccagttatgaccgacactttattaataacaatccgccttttgaaggacaaaaccatggcggcccagtaaaagtttgatgatgccgttctacgtacagtaacgtgcgtcaataagggacctctgatatggataggagtttaaaggctattaagacgaacaagtggaaaaagaaagaacaatgtattgatttagttgagaataaatgacacaccgcttttactaatgagcgtggagtgcaaccagcacttctgaatcgtagaagctgacacattatcccacgcagactcgcaccacttcatggcagttagtaagtcgactgtataagcatcatcgcaggattctccaatgtagccaagtgcatgcatcattttctgtgtcagcacttcgcgcttgacgcagtaaatgatgccctggtccctgggctgcatcttcgctgttgtattaggcggaagtttctcgacgcggacgtgcgtcaagcagagacccgtctcatcatgggattaggaaaaaatggctgcacaaagtgaaagggggtacagtaaagtcgagttcattcgacctactgtacttacgtgtagtatgcagcatactgtatactgcctaagctcgcagagtgcgtgcgcgtacttttattttactagggctacgcttaggctgggatagcaatttttcggggacaaacagagctttcagcacagcagtagtattacgactatcaaggcgtgcaagcgcgaccacgaaactaagctaagcttatcgaccccctctcttgactaggaagtgagaagaagagctatcagcttcatgggtgatacctttatgaaaagtatataagttcgcagtattctaaatcatgttgtgttttgtttactttcgcacggtcttgtcatttttagtaccctgaaataatctgtaggtcatgatgtctagtcactaagatgcgcgcatcatacacccttccagctacaatattgccgtgcgtagcagtcgtggcgaccaaagcgttaggctccccagtgttcgagcgggccagtaatgtaaacgtgccaaagaagctttgaaatttaagggtttctaaaaaaaatagtctgctcaatgtctctgtaaaagtttggcctcatgcattgagggctattatcacgctttcgatcttgcagctacaacatttgtacttctcagttcataccgctgatgaagaattgcgcgtgatgcactggcgtggtcatgaatataactatcatcgacgccattctaacccagtaccacactacatgcatgggtacatgtagtcaagctacaaatactaaggttcgtttgggtttagatttttttcttcccacctcttccaaccttgctatatctacttttcagatcgttttactagacaggagatgccatgggatgctcatgggtaatgataaaacgcctcctataaaactaaaaaaactaaatcatagccttcgtaggccctagtgccatggccatgtcacttcaagggccgtggtggttgtattctggcaatcgtcgtagctcgcgtgcaagctggacgcaggcgtaggtacgtgggctggttacttggtttagtgatagaatgggaaatggcacaatagctgaagttccgttctacgatggatgtggtcatgcagccacctatcactgaaagacaaacagcgactcggcttcagtttaccggcctcagtttactggcttcagttaccgaggtccgaattaacccgatttgggctgcctagcagcatgacctatcggccactgctatcccagtaaaataagacttcgtcgttctaaagaggatggtacagttcgcatagcacagcccggaaagcatcttgctgggcccacattttacgcggtgtaccgtaacctgcacagccccggaagaccatcagtagagttaccagtgttgcgaaagtgagagctggtaaaagaacgcagtggttgctgataattaacgttatttttggcaacagctagcaggatgaacacgtactgctgcttgtaacttacagcgatatacctgtactgtatgttgcagtgtcctcgatttccaatgaaaaagcaatcgtttccttggttccagatggtcaatgcttctactctacatgttcaaaatgcgacgttactcggatgcgtacggctggtgcttttaaacggttttaacgttgcagaaacactttaaaaagcgagcttacatgtaaatgctagacggaagggggtgggggggccaccaagccctgctgaatttctacatttgcgacctctgctatattcttcaacgctacgttatcctatggctgtggccggttggcgagtagaacctgctttggtaactaaaacccgtaaaatgtgcaaacattggggcgattcccgcagcattctgggggctcgctgcggaaatcgctccaatagctggtccacactaggagggcgtgagcgaataacctacatacaccccagggtggataaaacatggagctggccctccgatagcgttgctatgataagaaggcgattaactactaacgttgccataagagttgttattgaggtactgtaacgactctttgatatacagttattgctatttcccttactttaagacaagtgctatccatcttacgtgccctatcaaaagcaaatctgcgagctccttagttaaccttgtggttctgcctcaagatcgcagccaagtactggtagtacgtctgccactccgggccgtttggcctgaccttcgactccgtcaaaatcttcttcgcaatggcaagcgtgaattctttcttctgccaccgcataaacctactcatcccgccgtcgattttcatgaggttggtcagaatttcgtcatcatacttcgtcagtttggtcgccttctccgcagctttcgcagccgccaccacttgcttctccggggcgagtagggggtgggtgaggtagctggggatttttctctcttcctcgttttcctcttcctccgtcctggcgcttctcaggaaccgcgcgttcttcataggggcggcgttgaccgacgtaagggtcgagagctgggtatgttccgaccgctcggcagcagtggcggggtcgcaactcacgacgaaagtggccacaaccacgacaagaatggagttcaggcgcatggcgtgtcatgagaactgagggcgtgggggttgcggcacaagttgaaaagtgtgaagggaaggcgggttggcttcgtcgctgttgggcacgacgcataggacatgccattagtgttgcagcatcccgagataatgagcatcgtgtcggtacagtattagtatcgcggtggtccaactaatcgttccgtcgttttgttatatgctcaatgttgaaggttacaattttaattaacacgaaaatatagtttatcggtccttttgcgtgagcctcgctatatatcatgcagcaaggtagtagtacacaacgctaatggtacacagttttgccagttttttttctcgcttggcacaatgtgtttgtcagtctcccgcttactgtgcggtaatacaatgccgtcgacaccgcactgtggtgtacttttaatactgcggtgaccgcagtattaaaagtaatggggtagacaagacccacctgtcaatgtacagttattattgtgccttgcatgctttctgtctaaaaaacgacgtaattcgttgttttggcaaatcacggtgattagcccatcataaagttagcagactaactcgtcgatttgagatagaatagctgctacagatctccccggagaatctgcaaaggtcggaccaataaaagctgcgaagttaaacatttcacgaaggttagacataaatacaattgtactgagtttgtcgatttcgcagaggcgtggcgcagcatcagagccgagctcgattagactttccggctttgcgacatttttcctcatctaactcagaacaccctcctgacagctggagcaaatctcgagcatgtctgcactacctttgcgaggtatattgtacattgctcgtgtagatatgtaggggagatctgtaaaacaacgagttaacgttgaggtatgccaactttcgatgaatggctggagtaaacccgccaatactacggtcctacattataacttgctcgcttcgtctgattgttttccagtcgattattatctcgattaacatgcgttcgctatctatcgtactaaactacgtctacactattgaagaacatccccgtttttaagtcgaggagctacaagcagctttaaagtcagcgtttcctgcctccaaatatttctactgctactatatgccgtgctctgatattcaaccttggtttaacgcgcaatgtcccgacgaagcgctcttcatcagaaccttgcgcgagagaaagagtccccgccgaaatcggttcttactccaaggagttagcgcgaatctatggggaacctcatcagttgccttttcttgcagcgaaccgatctactcttgcagtggcaaccgctccattcttgctctgcgttgtgcttgggactagcggttgattagtttaactttaacttcgagttaggctgcgagatatgatcacagggaaggattcgctcgttggtttagagcatttaatcgcatgccaaagttcgtgcaaagcacaatattaggtgcacttaattaaggatacatatttagcctatgatacaaaaaagtaggaaatgcgagatactcgaccgccatgcgatccagtggaacctgtattctgtcgattacgtccttgagatgaacttgtagtaggatctgtgctgtacacatggcgagggtagtcgtttgatgattcctcgacgacttatccttactgtacatggaccggtttgctacaggccctacaatataaggggtaccgtatttgagatctcatacttcatacaccataccttgaagttgtattgttgtattttgtctttgcaccatttcgccctttttgtgcgcattgttggatctttcttgccaaaaatggccatattctgtcgcaaatgcactatctctccgctctgaattatgaaatctctctgtagtatgaaatctaaaatacggtaccgtaaaacacggatccaatgctacacgtggatcgggtgcaacaacccgtaaaaacgaaacacaaaatagtcagaacacaaagttattaaaggtgacaccccgtctcatgttaatgttaccctaaacgtcttgcaaaatcggagcctcatcttcttgtacagactagagcgtgagaacgagacgcctgatacatccggatttaaaagagaatcatatgtggcagacaccactttatatattttacattgactctaatacctcatctcatcggttaaatcgggtattagttgttacccgtctcgttctcacgctctagtctgtacttcgccaactcgaaaccggtccgcactatctcgcggaccaattgggacgatgccgctcttaataaatccgtttcggatacttgctgccaacaccttgttccatgcatccgcgacaaagcgggagagcagctcgcgcttctgttgagatgtttctggaaagtcgttctcaacgtggtatgtcaggtagcaatcataacaatcaattattcaatgacactgtgatagcgagatcgttcgtagcatagacataccggacgtgatccttgaaagacttcattacagccacgtccataggttgcgcgatgccggtgatgccaggtggaataaattccaccggtgtgcagcacttctcttcaagcacagtcttcaccgtttgcatcttgtgcacttttaagctgtcgaggagcaaaagcttgcagccatctacactaggcctccaaatctttacagcataaaacaagttaggcgaattaaaattcaacaataattcaaacaatgcaatcagctagatacccgttgaatccactcatgcttcacgtcctcgctgcaatacgccttacgctgcaccgtgtgctcgcatcccggtgacccaaagtatgggctccataccgaatgcgagaccggtccaccagggataccagcaaagacgatgagtggcggcagcttcactcccgtggcggatgcggccaggaaaacggaggctctaaagccatttacctcgcagcctgttaaataaaaaaaaggttagaattttttgtcgtcaaaccaaaacaaataaactcaccttgaacgacgtcgactgtaggagtccctacaaactcaatcgtcattttaacgttcatgtcgataaaaatcgcggtttggtccatgttaaagacagactcgtacttcagggcacccttaataaacgacaacgacccggactcctcaatcacatgctgtattgagttggaaaatacgccggcgacgcgctataaaatacatcccaaatctgaatgttagtatatataagtaaaaccagtaataattgtagactcaggacctctttttgcgtcctttatgcgtgatgcgtcggatagtaagtcggtttcgcttaagcaggcgccgcaggaactcaacctttgcagccctcgatcttgatgagaaaaggaatgcattatacctagcatgcatgatgaggaggcactccatagaaacgcagagcgagcggttctttcgaatatcgatgatccactgaagcagtctagttaaaaataccaaataaatgagttactaaaaattcttcacgttaagctttgaaaataataatgaatacctttcttccaactctgggtttttgatgtacatcgagcggttgttgccggggtttacgtggtacttgttgggtttggcggacgtaagggctgtagcgcccttctaccagcggtagattgtggtgtggtgcacactggtagctgctgcagttgctgtaacagtccccgccgccatggcaagggcacacagcttgtgcttgttttttttctttgggcggtttggcattccgtgagaggaaaataactgaaaggcaaaaggggaggatgtcagctttggcgcctactaggatcactggcaggaagagccccgaaactttttaccagtgtaaaaactagtgtaccgtcttttttatatttattatcaactttttacgagtgtaacattggatccgtgttttacggtatgtaggctacatgtaaatacttatttaaatgtgcaatgtgagttggtgtgtgtagcgcgcgtggcagcgagtcctgcgtcgtgctgcttcggccccacacgtgattgatagttttagtgctgcccccggtgggtatcatataaacgcgttactgggcagatgctgcggctgcgaagcaggcgccgtaattgcccgtagtttgaattaactagtcgtgtttcttgactcgaattctgtgctagatcaaactttgcgctgcaaaaccgctatcacggctcgagcgtaaaatcgactagtgacaatatataacaaggagacccgaatacgagtcgctgtgcccaagtttattagttttaattgattaaaaagcgtgcttgcatgttcaacctctttgtctataatgatgatcgatgatatggagccgatgtagccagacaacgagtacgaacccaaacaaaactccgtaatcaatgtgtcgttctttccactgccaaaacgtttgatcatttaacttgtcctacggatgtactaattcaaaacgagtgtcgaggatacgccaactacgttaagtgcttaatttctttatttttaaatgcaccgcctccccgaataagacacaaatgctctgtaccgcagtccagtttgcctcatccaatttccttagctatcctagcctaatcaaagctctcgtatgtgcggtagcgatttttgatagcgatttgagaggaactagatgatggtacagaagggcatatttttggcagtacagtaatgtccctcaataaacagcctctgatatggatagagtatagcagactatcaatactacacagacaataaagaaggggcagcatgaattgatttagtacgacacattacctggattgaaatgaagcgttgctgatggtacggtaaaccattttttaaatgctttgtctccagccataacagcaattcaataccttgagggtcaagaagctcaaaagggtcgacacagtttgatataatggactaaggtacaacagcaatacactataaaatatctaatatcagtacgtcaacaaatattatcctttcttttttcccatatgttatataatagcgtcagtctattcgttgttacaataggggtgggtcagaattagcttttcgccgacctttttcggccgaaatggtcaccataaaaaatatggtcagccgacatatccatttcgcgaaatggttcacctgtttggccgaaccatttctgaaatggtcagacatttcccgaaatggttgctctgggacatgcgtggcagacagataacgggcagctaacgctcctacgttcctacgtgcgtcctctacgcagcgctgttgtcgcagaggcgcccgtcggctgcagcttgctgcccgagcgcgcagcaagctacagctttgcatgtctacatgtagataagctattcaaaaaatgaccggtcatttcatatctgcccctaatacctgattgtttattgaggcacgttactgtacatgtagtcataccattcgaatcgacgacccgatttgaagggatatgctaatcgggagtgttcatactgggataatggaactcttccaaaactgacacaaacgctgtcacaaaatcgcaatttatgtgccaaatatgtccccgtgtgcgtcgtgtttgctacaaccgatgataccgaccaaaaccatcacatctgactgctaaatacatggctacgctcacgttttgtacatgctggctagtgaccgtgccgcggtgcggctagtcagctcattagacagcagtagtaaacaatgcgtaaggtgcacgtacaatcaacttgggtggtagtaaacactcagcctcttccgctggctctgctgtccacggcttgggcgcgctgacgcagagcttgagagcgcgggcgtgaacgcacagcatgagtggtgattgggaattgcaccaaaataatggtacgtttcatttgcgctcgacgcaatttgtggagacgaatttgacgtctccacaaattacgacggatttttttttgtattgtagtcacttagagaaacactaacgacttctaatacaaagctcccgccttcgctcgtttacgtcgctggcaagctaccactacatagcgtaatggggtccgttaatgcggtggactacgccgtcgtgagcacttaccgttctgataagcgcccatccatccagtattgtatatccccagccgcgagttgagctgcgggcctccacagggtttcgctgtgcgcattcccatcaaacacgacctgtctgctgaatctggagtccattgccatattagccggccagtccgccgtcttgttgaactctcgaagatgataaatccacgagcgtactacacatatatccgccgccactcggcagcgttggtagagcacacggaggtgctccaccttgggcgggttgcgccggtgttgctgtcgaacgatatgctggctgtccccaactacgtgcagtggtcgaatctcaggtgtccttgcagcgtataatagccctctgtattctgcttgattgttggtcgtggtagccgccgcatatgacatgctggccgcccagatatttacaccgacggtggatccatttcgaagttgcacaatgactgatccgctgccgtctggccccggattccctctagaaccaccgtcaaaaaataaaacgtagctagtggtagtgcatgccactcgcacatgtgttgggtcccaaaacccatgcagagttccaacaaccgagcggattgccctgtgttggggactgttccgtcgcgctttataatatgcgtcttccacaccccgatacccacttcgtaggcgagccctgagcattgccgtgtgctgtggcactgccgtcgaggccaagattgaatagtgagccgtcctccatttccaaataacgcgaagcagggtgagaacgcccagtctccagcagtcttgagccgctccgtgcagttgaaggaggatggcatccctctgcgccttggacaaccaaaaaagttcctcctctgctcgactgatgaatcatattggaaccgcagggaggtcaaaccggaagcaagtggatgtatttgtccgatccacggagagcccaagctgcgcccagcgtgttaagaatacggaccacagcgtctgttctgacgggcactcccagaagacgtgtgcaagcgtgggagcatgacatccaacacacagtgtatgtggacatcccaggcgctgttggagacgatcgtagcttttgatgccacgtgttttcagccgatacaggaaccgtccaccccacgcatccaatccaggccagcggcgaatctgttgccagggaattgccgaaagagcttgatgaatgactgggtccttcgtattccattgttgtacccgctgggttagcagagcgacagcgtctccagtgctgatggcggaggctcgctgcttgatttccctcctcgtacagctccagcggcgcttcccgacccacaagcaagctagtcgatccagtcggggtgggtatggaaccctacgatttccgaagtggaggcaatcttttgctggactgctgcgagaaggtgtggaacgccgtgaataggaaaaaagctgggttcgctagtaccaaccgtggacaatctggccgttaatggagttgccgatggaacgtccagcgcgtacgggtggttatttctggttggcaatctgatgccctcggtgtaccttgagtcgtagaccatgtcaggcagattgagcatcagaagtccgttgaattgcgtggcgtgagttttaaacacttgtgacggattcaagattcccttgccatctttgagcagtttaaatgtgatgtggaagtcattaacgtgtagccatcgtagaatgtcaccaacacgggagctcgaaaccgtaaagctagagttgcaaatcgtaggcgtaacacgatcaccaccagctccaaacaaaaccaattgtcgaagttcaaaccacggcagccactctgcacataatgtaccgttgttggatccaagccattgacgaatatcgtaagttgccgatcgtttgatgtggcgtatgtcgatcagacatgttccacccaaccactcagagagagatggaagggccgcatgaatcgcaataatcgatggagttgcgagctggacaggggagggggtgcatgttgcttcttgagtccaaccgcagccagcatgtccctccccgcccttcaaatggaagaggggaaacgtccgtccagggggttgagctccgagtagctggctgagatatacgtatctctgccggccgctggagcaaggcgcccaatcatttccccaacaacaagcatcgtcttatcgctggtcagcgcccagcgggcgacctccgtggcggccaaagcgagaacttcgagacgaacttgagggatagcgagtcccccatgcccacgagaaagcattgcaatgtcactcgagatccaggctcgccccagaggccccgtcccatcaaatcgaccaaaccacacaaaattgtggatgagtttctgcagatcctggatacgttgtggtgtcggccaggagtgccgagcaacaaacgtgagtttcggaatgataacagatacttcaacaacagcacgttgatcttcggtcaggagtttagctgaagcaattcgtaatctggcccgcagttgagaagtcgttttatcccacgtgtgctcagccgcgcattgactgccaacttgagccccgagataacgcgtgaaagcatccccagcttgaaaaacaaaccggccaggtaggcgcatcgatggtggcggaccattggaatacagagatatgacagcggccttgtgttcgttgacgtgtagtccactaccttcactaaaagcgctcgtgatctgaagcaggcaggggacgtcttgcgaggacgccagatatacggccgtatcgtcagcataccctcctactcgtaactcaatattacgtcccgctgctttgaggtgaagtccccgtaacgacttgcttgcttcaatagctcggtagtaggggtccagcgctaagataaacaacaaaggtgcgagcgggcacccctgcctaattcccgtcgtcactggcacccacctcgaccgagaaccattgaccagaaagcgtacctgtgtgccctcgtgtaggcggtcgatggcacggaagaattgggctggatagccatgcgcctcctatgcacggatgaggtatcgacgtccaagcgaatcgtaggctttttgaaaatctagtagcagcgccagagcttcgcgctgctcgtcatccagattcgccatctgttgcgcagccataaacagatcgatcgtatcatgtatttgacgcccgggtacaaatcctttttggtggctgtgaatacgagagagcaacgtcttgctcactcgagtagccaagatgcgcgtaatgatcttgtagtcagaattcaacaaggcaaacggtcgatagttcagcgggttcgacaagtcaccactcttctttaagcagaagatgtctgcttggagaaacgtaggtggaaatacacccgctttgtaccaaatgttgaccaactgcgtcagaatcgggatcaagagctccttaaagtctcgataccaatcattgccaagtgtgtccgggcaccatgccttccctgccttacatgcaccgatagcagcagcaacttccgcttaagttatttcagcagtcactgcacgcatcaggtcgtcctgcacaccatgctcttccgtccatttgagcgcgtcgtccatagctgtgccactggctgactgaatattgaagtccaagcatctgcgaacatgttcgccttgtcatgaacatcccgtggggggtgcacctcactgggaatcagagtcggaacagcgttgtccgtaaacttcgtcgagatggatctaaagagctcgtgtgaagatttgccttcgtgccacgcgtgcactcgtagccgttgtctcagcttggtttgtccacgtgcaacaccaagctcagcaatagcccgtcgaatcttatcgatgcgattgctcggtactgtatcggctaacgacagtgtatccatcgcagcaggtaaagcgtccatctcgtcctcaacgggactgcgttgatagcaacacgtagctgcctgagaagtcgggcaagtttctgtcgataagttcgtttgagccgccgccgggcttggcgtctgcatcgtcgcacaccacagacaacccgctgtttcgcgtcctcccatagatccacagcttcttcagcagtcagagtatcctcagcgatgcggtccttgagtgcttcaaggacgccgcgggtgcaggcattcacagtgctttgtgcatacccaggaactgggtaagttcgcagtggtttcttaactcgcagcaggttctttggagaccgtaagtgtactaacactccatcatgatctgcgttcgccgctggctgtacaaccgtgaccgcagccacccactgctgcagggaactggtactgtaccaccggtcgagacgacatgtagccgccgcaccattgactgtgtatcggaaggtgtggttgttcatgtggaagaggcgaactcgaccttgatcgtgcggtggcggcatagcagcttcaaggcagtcacgagctgtccacgatttaagcaaacgtcgtagttccggagaatcatgcacattacgctcagaggggtacgatctatccaaaccgccaacgagcgtgcagttaaagtccccgtccacgagaatcctgccatgatctggccgatcaagcatacgcaaatcgctttcgcgctcgcttctgtggtattggaaagtggcagtttccaacgctgttgacccgccagcccgacaatcaagttcaatcaaggggcgatctaggcgaggtcaagcgagagacggagatggctgcttctgattggatgatgacattatcctcggtagagtgacaggcagtggccgaagcgtcgtcgggtcctaatagaaccccgaacgaggcttcatggtacccacttttaggtacagatgcatttagttacgtacttcggccgcacttattagtgtagccgcggtcgtcatttgatgtgtccggaatcgccttattgcgattgttcacagtagatagttgtaaagggacataggactcatcataggatggccagaacgaggcccccagggcctcagaaaactcagtaacaaaaagacagtcttccctccaagccaactagggtcaagtccgacttcggtaagtgtagctagcttattgttgtgcctgggcacgctcggctgcgtgtggatgcctgtcggggagcttatcgtgcattgaccgagagtttccttggcagcgccaagagttggcgtggccggagaggcaggaacggtattagagtatcgttcagtatatatttgtgggattagagtgtccctgagtgtattagtctacctaccgaggttttaccttggtccccctgtataaggcctaacacgccggtacccttccttcctgagggactgcagtggggttgcgcgaaagcgctacatagtatcctagccttagctcgtggctagcggtacaggtttttgggttgaccgaagataacctaaggtgcacagaggcgcttgcaaccgacccggtgtaagggatcgttcctgatcttcaggttttgatccaataagcgcttacctttgcgggttagcgtgttgttggtgtctctaatacattttggtagaagagaattttcgtggtattaccacaacacaactggtgccgcgatccgggattggtgtgaccttctgtgtgtcttggttgttgtaggtctttacccccgacgagcgaagaggagaagaagaggaagaagaagaagaagagagaagatggcgaagggagtgaagtcagcggtaccagcaacgccggccaagtcgagtggaacgcgcaacgagacttcggtgcgctccggaagctcattctcgaccccaacgacggatcggatggagtcgattgacgagcgttcggtgagctacgacacggcgattgattcctcggacgccaaatgagatgacgaagatgatgactgggatttccggacagtgatgtccgagacttcggaagctgcggttgtttcggcaggtcgcagtggaggatcaagatcgattccccgcgacctctccggcacgttcaaggacatgccgggccccgagcccgcctacgacgcggacgacggcgccaccgagggcttcaaaccctcggttacggtaggaggggcaacctccaagccggttggcactcgtcctcctctcaacggggatactccggcggccaacaaggtcctaggccggtgcctagacctgacgaagatcaagagcgaatggatgcagttgttcttcccgaagcaagtccgccaggccatctggatggacctctgaggggcgttggctacgccgatcaactcaacgagcactcggcacgttgcgcagaatactgtggacctcctgcgagctatgggatgcgaaccccagatcctccccacggaggctgcgctcgcgagttggacgccgaccgccgctgccacggcgttaaccaagtggaggaacaagctgcgtaatgcctttggagtggcggacgtcagttcgcgaggcccaacaatgcttcgttcgacttcggaggcagtagacccgtcgacggtcccacccctcggaagggagccactgatgacggtgtctttgcaaccaagggcgaagcctcgccgtacatgcaagactcgcacatggtaactccacgatctacggaccgtagcgaacgtctggctagggagaacgaggcttcattcgccacgcctggcacgctcggagcgaccggtcgtcggtcgggccgacgttacgacctccataatgattcgtcggacagcgacgacgacctcggacccgactactacgaaggggacctaccgagcgaatggacacgtcaggtgcgcgagctaagcgcgaccgacaaccagagctccaccccaaagctcgagatcgccacgcatttgcctctcgccaacatcaagccgttctacggaccgcgcgacaaaagcgagcactccatgcagtggctccgaacgttcatctatgagatgaagggaacgcatgcaccacccaacgagtggtgtatgccgttcgaacttaagctcagggatggagccctgcactggtgtcgccagctctcacgcaagacaagacgcacgtggaagttgctgagcgaggcgttcatcaagtactattgctcgaagttttccaagtctgcgaaggctcggtactactcgaccaagcgggaagacaaggaacacgtttgtgactacctcaaccggctcaacggttacgctcgcaacgccggtgtgaaatttgaaaacggtggtcgtgacgcgaaggaccacgtggaccacttcttggtcacgtttgacgaccgaaacttagaagaccgtctgtgccacgtccgggtcaagagcatccatgacctcgaagatatgatcaacgacatcctgcgtcaccgtgaccgcaaatcgaaccgagaatcgtcgttccgccgctctcggagtcaagatgatggacgtcgacgcgatgcgaggtcgaacgaggattctggtggtggctaccgccgcgaacgacgctactacgacgaagaccgtcgcgaacgacgtcgccgtgacaacaaccgccgcaacgaccgcagtgaagacgaccgtcgccgtgaccgacgcgatggatcaccgtaccagtcccgagtcactttggttgacgcgctggccaatgtgatggcggaatggaacgtcggaggctcggtcggtgcacgcaacgaggctccatacgcccccccgacgtgatgctgaggcgaacgaggattacttcgaggatgagcgccaatactcggacgaccaacgctcggacgaggattcagacgctgattacgactcggatgggtctaccggacatgtcgctgctgctaacgatgctgagcgcagggccgcagccgaaggaacgttcgctcggtctgataaccgacgcttcaggaacggaggaggcccgtccaaccgtgaacgagatggtcgacgccagtatgggccgtgtgccgcgtgcggaagcccgtcccactcggtgcacttctgctaccggcggtgcaaactgtgcaaacaggtgcacgacgctgggaagtgtgaagcactccacgagctcaccaagctcctgaagtccaaggtcgacaagaaggatctgtcgccagaactgcaaagcctggtgtatggaagccatttaaactaggcagcccgccaactgaaactggggtggtcccaatcgggctgccacagttagctgagcctgctgttgatgcggactatctgttcgcgttcacgggcgaaagcaaacggcctgacgacctgaagaacaatgaacgtgtgaaaccgacggaaaatggagagaaccgggacgcaagtctcgttgcgattggtattgatgaagatgatgatgatgaacgtgatggacacccgaccgaggctttgatcacaagtctagcccagatcaggggaccacctcggagcctcgttcgggcggtgaaattactgcccggcgagagactggggtggtggtcgtcccaacgatacgacaagaggaagcgaatgagggctttggtcaatggcgcagtgggcgacgcgcgaacgaggatactccatgacactggagcgaatgttagcgtgatttctgccagcttcgccaagcggctacgtatgcgagaagtccgggaccacggacgaagtctcgaagtccgcggcatcaacccaggggtgatggagacccggcgacgggcgctcgtcaagatcaccctcgggtggtagcaggtctacgaatttgaaatgtggataatggatcacagtgccggggtggatgtggtccttgggatggacttcatgattccggctggaatccggctggatctatttcatggcaccgcaagccttccggacgaggtcatggtacatctgctaaaggcgaagagtgctgaagatgacgaaccttacggcacgcagccttcgtgtgggccgatcgaggatttatacatacccggtcgcgagtggcgagagtttcgactgccgcgccagcggctacctcgttcggagtacgatgtgtgggtacgacgcacgggcaagctcgtgccgaccgtaacgaggtttcgacgggggcagccgacgtggatacggctcaccaatattacgaccacagcggcacagtgcgccaagcatgactccgtagtgctgtgggtaccgcatggtgaactaccgcgagagaccggctacgcgaggttggactctaacaagtacaaagagtggcaggtgttggcctattcaacgagtcgtgatgagactctgcaaggacgagaacgtcgtctctacgagcaatggttggctgatcagccgcctgcggtcgagcgccgaacttacccaacgccgcgaaagatcctgccgaggccaccggatgcaccgccatggccagaaggccgtcaaaaagctccgttgtttgatgagtactcgtcacccgatgtacatggctacgacgacgaccccagggtcagtgaaggctcggtcgatgtcgcttgagctgatacaaccgatgtggatcgtgctggtgggtcgaacgatggttcggacgacaaggccagcgcgtcgtatgactcggacgtacccggagactcgccgcctagtcgagcgggttgccagcccgtgaatccgaatagtggtgctgactccaccggccagggagcgacatacgcctcggttgaggcatcggaaatcagtgatgagctgagtgatcgtgacagcgtgacgaacgacggttcggagaatgaccgcgacgtggtagcagtggccgagacaactacatgggatatcctgccaacagggaccgctgcgtccagcctggagccagaggaaacgtcggttgcggtgtgtagtagcgaagtcgactggggtgaacacgacccagggcctaacgacgttcctgctgaagccggaacctccaccgctgacgccgacactgaattccatgattcggatctaagtgcgatcgacgaccccgagcagctactgcaggcgacctatatctcggtcatgcatgccatggctgcagaagggtctggcgaaggtgatgacaccgtgaacgacgtttcggagcacgtcgcgaacgagattgagcttaccgactacgcgcaagatctggcattcttgccggacctaaccgaagcatcggagacgacgctggactactcggggcaaaacgtccagagtgacgaactcagcgtgaagcagcagacggtcctggtcgatgtgctgaagagccacgagaagatcatgattgcgagcggtaacgtcctaccgcctccagcctacggggtcgtgtgtgatatcaatgtacaggggcacgcgccaatcaagcagaaggctcggcggaccccgcttcgcttcctcggtaagctgtacgaatggctgaagggtctgttgaaggccgggcttatctccttctcggacagcccatgagcgtcggcaatcgtcatcgtcctgaagaagaatggggtggatatccgcctgtgtatcgactacaaactcgttaatgcgatcaacgagattatggagtacgccatgcccctggtggatgacttgctgacggacatggaggcgtacttgtggttttgctcgcttgacgccgctagcggcttctgggccattatgatgaccgaacgaactcggaagatctctactgtcgtctgcgtactggggcacttcgaatgattgcgtatgcctttcggcctgaagaacgcaccgatgatctatcaacgcatgattgacaacgcgctttggggctttgtccaaccgacgggaggatggtttaaattctcggggcgcatgcgtctagctgaagaacatgacaaggaagctcatgctggggtgaacgaggcttcgactggcacggcaaagccattccggacaaagttcaaggccgaccgcgacaactcgcttggtaagggagctgtagccgaaccggtcaacagccctatcgccgacatgttcgccaacagggagcccgatgactcctcgttgacaccagtattcagtcgccggtcattcgtggatgatatctgtttcggtgccgagactttcgagtcgtgcttggcgacgctagaccgattgctggcacggtttgaagagtgccgtattagtatcagcttcacgaagagcgtctttgtgcagtccaaggtagacttcctgtcccacgaagtctcggcagaaggtatccgaccggacgctaagaagctggctggggtggccgagcttccgttcccgtcaacgaagaaaggaatgcagtccttccttggggcactcaactattacagtcgcttcatccaagacttcgcggtctatggagcagcgctgtaccagcttaaggacgaggacttccagcccgggggtgacctcaccgcggccaagcacagcttcgcgatgctccaacagaaggtttcggcagcaccgatactacgacacttcgaccggaagaaggaggtgcatgtcatgttgttcgccaacgagtgggctctaagttccacgttgatgcaagagcacgagggcaaactacaccccgttcgcttctgcggacgtgttttgagggatgctgagatgaattatcacccggccgagaaagaggtcctcgcgcttctgctgatactgaaggtgtattatactcaactcgttggacaacgaatccgggtctacactcggttttcgactccacaagtccaagacattgttcggtcgggctacccagttcgccgtcttgctgtcgccgtggcacctgttggtcgaacgagtcaaagaaacccactgttcgtttgctcagctacttcaagccggcttgacgaacttcgttgacttggataagtcactggcgttggtcacacccggtcaccaactgctcgtttggactcgcatctgctctacgcacgcctaccgcggtcctaccgaggcttcgttatgtcgtttgacgggtctgcgaaaaccgagaagaacggtggatacggcagttgctcgtggatactatggaagctaccagagtggacagtagtgctcgctgcgagcgcttacctcgagaacaccacggtcaacctcgctgagtacaccgggatgaacaacggcgtcgctgatgcattacagcatggagccgacgatctagttgtcgttggcgacttgaggatcgcgatccagcaagccctaggggtgatagcctgtcggaaggagtcattgctgcaacaactcagccgccaccaagaactcacggccaagcttcggtcggtgaagtacctgcatgtggtgagagagttcaacgctgcggcggactggcaagcgagactctcgagtgcaaggagtctacggtggtatcgtcggacgaccgagtattagagttgatgaagctgaaccgtatcgctgaagtcatctacgacgctgctgacggttgcgtcgtcgaggacataccctcggccaacacagtatgggccgtggtagcttctgccaaacctcgtagcaagcattttttttgattttgtgcgaagagaaaccgaccgcagacggcagaacgagactgaacccggacacgtagctgtgatgaccagacgtcaaacgagagcaaaggagaaacacgtccggtttggatatgaagtctcggtcaccgatcagggagacgcatctcaccgagtagaagccaatggtgtgccgaacgagtctcagaatgaagcagaagcttcaccgctgcgtgccgagacgtcaccagccccaccaaacgcagaagacattgacccgctggtagtacaggaagaacgccgaaggagaatcgcctccgctcaagatgaagagttacggtggtcgaatctgaaggcagtgctccggggagatgatgcgaagattggatacagagcagcacgagatgcatggaaaatggcggaccaatttgtgttgagcgaggacgatgtgctatattacacaagaacgagccgtcgttcaagtgacggcgagcaagccgagttgaagatgagactcgtggtgcccacaacgatgatccaagacgtcttgcaaagctgtcatgactcacttgaaggcggtcatcaaggtattacccgtacgctacatcgagcggcgagagactattactggatcggccagtatgccgatgtgaagaaacacgttaagtcgtactctgactgcagttcaagtaagagccgacctcagttccgcgggtactcgccagggaacatcctagccgagagacccttccaactagtctctatggacttcgtgataccgctaccgaagagtcgccgtggcaacaaggctctcctgctattccaatgctcgttcacgggattcgtgatgggcaaagccatgtctgacactaccgccttactcgttgcgcaagctttcgaggagtgtgtctaccgacgttttggagcaccgtccttgatccgtcatgaccgagatcctcgatttatgagcgaggtcttccaagccttcgcggaaatgatgcagtctcggtcgagagcgaccctgagctaccacccgcaggccaacggccagtaggagagatcggtgaagacgatcatgcagtcagtccgcgtatacgctgaagacccactacagcaggattgggacgagatcaccgaaagactgatcttcgccatcaatagctcccgtgatacgacgaggaaggaaactccgttttacctcgttcatgggtgggatgcacagtcctcgtcacttaaacgaggcttcggtggccaaactgacgcgctagcatggcgccgagaggtcaaccgagagcaggaaatcgccctgaggatggccaaggagtaccaagccgcggaaaaggctcggagagctgaagagtacaatgcgtcgcttggcaggaaggagaaggaagccgtggcaggcgtcaacgagaaaagaacctcggtcgaccgggcaccgagttcccgtgaccatagtagagctgcagtgacgagaacgaggttttctttgcagcccgggagcagagtgtggctgtacatggagcgggttcgaccaggactgaccaagaaactagcctatcggtggcacggaccgttccgcgtgaagaagaaggtcgacgaatttgcgtatgagttggaattacccgaccgaagtggataccggttctacccggtggtgcatgtttcacgactcaagtcagtggacgagttcgaaggccgaccgagggttcgtttggctcgtgaggtcaccgaaggcactcgtcttgacttcgacgaggaattactgcctgaagacagttttgagccggaccgcctggacggtgagtatgaagtcgaggctatcctcgatgaccggacaccgttgtcaacgagcactcaccgggccgtccgagagttcaaggtgaagtgggtcggctatgacgagccgacatgggaaccagcgtccaatctctcgtgcggcggcctcctgtacgattacctaggccggaagcgaagcgaccgacgtttgcaaatggtccaggtggccgacgaggagtaattctgcgccccaacgaggattgaactgctcgcgggggcaatccagcccgcgatgtcagacgaacgaggctactggagatgatgattgaaccgcctgcgagggctatccagctcgcagtgacaggcgaagaaagttactggaatctgcatgttacgtgttaagtgaacgagtcacgatggaatggagatatcgaaatggagccagggacaacggaagacgcaagcaagcctcggtcaaaccctcaacagacgaaacaagtgatgatgaagcaaatgggagggcgacagaggcttcggacgcagtgattgccatggaagtagcacgaacaaggtcgctcgacttcgtggttgagtatggagttgatgatgaaatgggtatgcaagctgtcgacaccggatacccgcagcagaccgggtgtacaattgtcaaaattgggctgtcatgcgaaaacatacccgcaacggagctagcgtaagtacgcccagtctcccgcgaatcaagtccggtcttcaacgagcataagcccgatcttcttgcagggagacaaaacgaagcccggctgccgcagctacgaaccaagcctcgtttgaggcagccacagcggtcgagggcagagaagaagctctgggaaccgcgaccgagtattgaatgcgatgtgcgttgatgcgagaaaagattatgaaatggaacgaacaacatgacgttattttggattgggatagcacatgcagcgtcgcctaaagcgccacggacctcggtcgacattggaaaagaacgtgaacgaaacggtgaagctggagcggggcctaacgaggctaaatctccatcacagcctgagccaacacgcccagacttgacccggcggcggaagaagtttcacccgactccttcgtctcctcatcggggcttggagagcgagaacgacgagcgtttgcgaactcggtcacccatggagcgaccaccatcgaagtccgcagagaagattcgaccacgaccgacgacgccacggtttcccgagtcgatccgttggggacaaacaacgggacgtcgttgcaaggggcgaaaggagtgttgtaggggtggtctgccagcgcttggaaccaacagttacgccacggctcgcgggcatccacgtccgccacctcggaggcccagtcgtcggaagtggggacccactccatcacctcgaacgagtattgcaggtacgacggctccagcaaaacctcggtgcggtgctgtggaggttgtccgccgtacgtaatggccccattccacaccttgtggagcatcgggtctcgcaagcgatctgcacgataactgcgctctcggtggtacttggaccacgcttgtcgaagcgctaggacttgcacgttgcgctgaccgagggtgttggcgaggttgtcgatatacgccttgacagctttacccctaatccagtggcgacgctcccacaaggcgaaaccaaggtcgcccctctcggtggagtggtaggagtacccctggaactgccgccataggcgaacgagaagagcccgaccagttgcacgacgggatatagccaccgaggatggaaaacccgtcgtatcgatcaaacaaggctcgtctgggaaaagctggcgcaacacttggaaggggtgagcaggatccgtccacaagccaaactccacgattccatccactgaactgggggcgaccaagccgtcctcgaagacgagggggacactggcgttttggatgagatgccagcattccgacgctccgggtgccgtgaaacccggctccaagaacagggtagcaagaccactgagcttaggagctacgtcggaagcgtcaaccactgctggggcaatcgacgcaggtccagccctcgatgaagctgtcaccgttgctgttaccatcgcccgagcgtgaacagaggccgaccgagtgtggagtcgactcgggagtggcacggtggccgcttgtgaagctacaggaaccccggtcgcggcagccagaggagaaggagcctccaaaggagcgacaggttgcgccaccgaggtttcctctctttcgtcggggccgaacatctccaggaacaacgctgcgcggtcctcggaagtctcggactcaggaggcgactcaccgctaggtgaacggtctggcggaccgccagagccctcggtgaccccagcagccgattctcgaggggcacggccgacgccggctgtaccagacgagactggcgaaggaatggaagtcgccgccgaaggtggaacctcggatggaacctcgatgacagtaccggaaggctcggtagcagaaccttgaacaccttgagcgctggccgacacccccggaatctcgccgggctcaagatcatcttgtgaagtgtcgctaggactcataccccctccaaactccacgtcagacgattcctgctgctgggctggggctggcgagggaggcgaggcgcgacgggccagccgaggatacaaggggacgtctgagtgttcgtacgggagaggctgagactccaaccagcttgagcgagccgtcgttggacgcgccatcgaccgaggatgcggggaaatctctcctgatgccgaacgaggactagatggcgcggcggccgctgcagccctggccctcaggtcgactgacggtctgccgaagcgtttgtgaggaggaggctgggatgccgtattcccgacggaagcagactcggtttgccgaccccgcttgcgcgatgacgactcagtggagaccggggaaccagcagaagcgcccaccgaagcagcgggagcggacgtagcctcggtggactcagccatcggcacgtcggtcgtcttgaactcctctccctcctctgacgaggattcgtcatggtgtggactctcgacagtgaccgtcggtcggtggggacagcccgagaagattccaatcaatctctgcggcggagatgccggctgaggccaggatcaaggtgtcgacgtcgagtccgtgtgctgccgattgccgacgaaggatagaattcgctcgccgtaagctgttgttctcgtccgtcaacgcttgaatgcgtgtggggatgacgtttgctcggtcgcggtcggccaactgcttccgaagcctttccaactgagtgttgtaggtaacgaggcttgcacttatacgctcgtggagctgggtgttccgacgtacagcagcggctgaatcggcctcagcaacgagcgtccgcttctccaacgactgagtgacgtcagcgtggtgaccgatggccgcgtttgcttgcatcaactgagcgctggcgttgctgagctggacgtgcatgtcctggacgaggtccagagcttggtcgcactcggagttggccgagacgaggaagtagtccgacttggtccgcaggttcatctcttcagcgagtttatctttggcgtcggagagctctgcctgcagccggttgttctcgcggcggagggccaccagttcatcagcctccgcaagagggagacgcggaggagcaacggcagcagccagcacctcaccgacgttagtagcagcttgcaggctgtggtcgagagcagcgttgactcgagccggaggtgaacgggcaacacccacgacgagacgagcgagttccagcatctgctgctcgcccaagacgaccgctgtcggaggaacctcggccgggccagcaccagctccgggagttggcgacggtggagcgctggcgcttggcggcagtgtcggcggcgagtcgggagcctcttcactgggaattgccggcgagggagtctcggacgccccagcagcagactcaggactacttggaggagccggtggagggtcgaccgaggtcccggaggcggcaggaatgagcgtagggtcacctgcaggcgcggccggggctgggggcacagcaccagcggcgataggggcgggggcacccgccgaacgagcctggtgcgccggacgacgacccgaagcgtcggtggcgacatcaacagctccctgagatgatcaagaaagagatggagtcaacaacgaggatccgaatgccagtgaggagccgcgggagcgacgaaaataccggtccggagcactggagagcccaaagagcagcggcagccgcgtcggcgaatgaggagccatggagtcgaagaactgaggacgcctagacgctaaccagcgtgggaggctcgcgtcgaggcgggggcagttgtggtattggaaagtggcagtttccaacgctgttgacccgccagcccgacaatcaagttcaatcaaggggcgatctaggcgaggtcaagcgagagacggagatggctgcttctgattggatgatgacattatcctcggtagagtgacaggcagtggccgaagcgtcgtcgggtcctaatagaaccccgaacgaggcttcatggtacccacttttaggtacagatgcatttagttacgtacttcggccgcacttattagtgtagccgcggtcgtcatttgatgtgtccggaatcgccttattgcgattgttcacagtagatagttgtaaagggacataggactcatcataggatggtcagaacgaggcccccagggcctcagaaaactcagtaacaaaaagacagtcttccccccaagccaactagggtcaagtccgacttcggtaagtgtagctagcttattgtagtgcctggatacgctcggctgcgtgtggatgcctgtcggggagcttatcgtgcattgaccgagagtttcctcggcagcgccaagagttggcgtggccggagaggcaggaacggtattagagtatcgttcagtatatatttgtgggattagagtgtccctgagtgtattagtctacctaccgaggttttaccttggtccccctgtataaggcctaacacgccggtacccttccttcctgagggactgcagtggggttgcgcgaaagcgctacatagtatcctagccttagctcgtggctagcggtacaggtttttgggttgaccgaagataacctaaggtgcacagaggcgcttgcaaccgacccggtgtaagggatcgttcctgatcttcaggttttgatccaataagcgcttacctttgcgggttagcgtgttgttggtgtctctaatacattttggtagaagagaattttcgtggtattaccactccacactgcggtcaattggtgcatatatgttcgccacgactacatcctgatcatccaacttgcccgctactgcaacaaaatgtggtgaccaagcatgttgccacattggacgtgtgccggagaaggatccataaggattaatcaaatttccaacaccgccgcgacgttcctcagctgcaccccagaacgaaagggttgggcggttcggcgtccccatcgcgctgcatactcacgctggtaatgttcaatctcctcggtctcaacatgtgtttcttgtataagcacaacatcttggtatccatgcttcgtcctcctcccgagtggtgaaagccaacttccctgcgccgctgccgtggcgccgaagccccgaacgttttgtgtgagcattgcaaacgttctatcttccgtatgcatagccttctctacgtcattccgggcaaggctggcgcggccctctcgcttcctgatcttcgctagttttcgtttctctcgttggaacgcttttcgcctacacttgcccatgtcttgtggcgtaataggagagaagtgttcactgatggtctgctgcgttgtgcgagcagcagaatctggcctccgcgtcgtcgagagtgccggcgcggacgcattcggagccgcgaggtccttagtacgatggtgagcagctctggcgatgcggcgtacccgcttcaccgtctgcccagacccgccccgaaggggccaccaacgcgagttgccaatctccacccgcaagaatactgtcacagatagccccgacaaagcgatattcgtgatgccacaccagtcgtgccctatgcgggactcgccccataggagtggtgctccaggtgctaatcatctaaggtaacgcgtgtaaaagattccaaacgtcatccgtaagctcgacgtagttgtcacggcactgctccatcgatacccactgccgaagtcgctgccattgcttacttgaccccgctaaagtgtaagaggcctccgtaagtggccgagagcgacaccccttcagccaagtatcgcaaaaggcgcggacctcggggggctgggtggggtcttctagaatacgagagatagctgcagtctgctcctggtacgcttcgcgtcttccccatgccagtatgtcctgcagtgaccattgtttcgcttccagctcgggatacggcaagaaggcaaacatatggcgaagtgccatgtaattttccagaagccacggcttgatggcggtcgccgtcgtattctttcagtccacccgcggaacaccgagctcatcacggtgtcgtgtggaccatttaacaaatgcttcccgattagccgcacaaagaagtcaatgtctgtgacaggagcagcaccaactatccgagcgtaagtggcctcgactatcgcgcctttggcaatccgtggttcacgtagcgggagtgtatccatcccctgggatcccggttgggatggctgagatccgctggcgtatccatctacaccataggcctcatgaatgacccgttcctcggtctccatttctgcttcgagtagacgctcgtcaatcggcattgcgttcagagatggcagtccgagacgagcaagcaccacgtccagccgagaacgcattggcatctgtctaatgattgatgcgttgatatgcgcctgtcgtgaaaccacctctgactcctgtatagtgtcccccggtaaagcattgcgctgctgaacatctgccaaccatgcataggaatgatctagcgtatccgcgtaatcggagtctccctccgcattccacagcgtcagaaggtcgccgtgctggacagcgtaaaaatgcatttcgtctcgctgtaaaatcatcatggttggcatactgtgcagcagccagcattcctccaagtaatctcgggccacccgatccgtgagagattcgacacagcctgactcgtgcactgcgccatccgggagtcggtagtctgtgtacatgtaacgctgcacttgtgcgtcaccgtgttgtttcgcatcgaaaacgaggaggggttcatgcatgtattgtgccatagctcgtaactcgtgtgtaccagcccagaagctacctggcacctcggtggtgactaatcggtctcgttcttgggcgtaatgtgcgaacagactagccgtggcactcgcaattccacccccacccccccgactttcgatcagggtacagtcactgcagctcggttatcgggttcacaagctccagttcgacatcccgacggagattggccatcatgatcgcgtagacgacacgtttcatctggtttgcaccccgtgttactttagcagaccgtggcaacttagctccatcgtagttgcttgtcgtggcatgaaacgccagcatagcacactggccagtagcggcgacctcaactggccgccccttgaagctcgcaagccagtgcataagctgcgttggcaaatcctgatcgccgtcggcggatcctgcatgcggagcacccatagtaaattcctcatcgctagtcgggctggaaagcatgtgcgtgttcggcggctggtcaaccggcattgacgcagcatgtgcaggccgttcagaatgtaccgacggtgaaacaaatctgtccatagtactctgcaccaagtcgccgtgcacgggtgcagctgccaccacgtcatgaccctcgctgccagtaggcgtaagatatgtagcctcacttcttagtcgctttgcgcgcaagtcccgttccagatcatcctaccttcgtcgctcagcttgttctgccagcgcatcagcgccaacgtccacgacaggttggaaatggctggtgcctgccgtggggtcttgtgtgaccacatccgtttcagatttaggctcagcacactcatgctgcacattcatgtcgatgtccgaattcttccttgcagcttccgggtacgcatacgatgcctcgtcaacgtctccatctgcatcattgtccgaaatatccatatcgtcttctaaatcactatcttcctcggtaagtacagcgtagagcccgatcgcttcctcgcgctgaaaagcttcaaatcgcttttgtggttttgctgccccccggcgcttgccagtctattgcttagctgcggcttggcgtggcgtacgagaaggagtatcgacggcgctatctggcactgtgtccttgctcaccgatgccgcggccttctttttcgcccgcttagcagctttggacagcttagtcgagaagtctgcgccgggtgcagtaggctcagttggacctggtgtggaggcagtaggtgaaggttccgtggttcgccctgtccccgattcagcagtggtagaaatacccactggttgctccagcgtgaccccagggttactggccaacccatcgcgttgcaaagtcaaaagggccatgagttccgagacgttatcgacttgatacgcagtcggtttgacaggtgacacacgggtcacgctgcctcggtaaacacgggaaaaacgcgcttgaactgcctccagttttgatgtgagcaccttgtatattttcactccatgacgagggctgtagcatctggggcacggctgtctgaggttgttttggtaccaaggctgttgtatccgtgtcaatccgcgtcacgtcgaccagagtgatcttgtgcaaagatgacatggtaaaaccgattgtcatagatatcagtcttcatgctccttggatactcgacatccaacaccttcgctccagagatttgtccgatagctctagcgactgtagcaagaccaagctgtgttgcgccgtagatcctaatcgcgtattgcagctgaagctgtgccgccgtgtagctgccggtaccttcattccctgggcgacgactcgtatcactcaaagtgataacttcacgttggaagcgaaaagctttttttaatccaaagcagtgcttggcgcttagagtaaaagacaaatctcagagtgtgatttccatcgtaagaaaacctcttgacatcaccgatgagtcgatgcatcatggatcgtcctcgacccgcctcgtcagtgttcgcgtgaaaaagttcttgcagaattgccaagtgcggcgcattccttgcaaggcgaacgctaggtggcagattcgccgtgagcgagaagttgaggtgtagctcgtgaaagtcttccagcaacgcgcggtgttcgctgatcatgatctccttgatgaagtgcggcgggtgcaggaggtccaactctccacgtgtgtaagcaagcagtgtagccgcctcagcttccgtccacgttcgaatactttcgtcaccgcgcacagtcgcctgggcaagtgcaagactacgcatgtcttgaacggctgacgtccaaggattgtcatgatattcgtccagtcggtcgtcagcgtagctagtagttgcgcccgctcagccggtttccatactccatgcagcatcttcgacttcagcgcctcctcttcactcagacaagtcgtcccacttatcccggcctgaacacgctgcagccaggatcctccgccaagcgagattggggtggttgcaactggtccagtcgtcttcattgacgcccccgtggtagctgggagtgtccgaggggatgggccagcaaagttagttctcgtgatgtccatgtcagtcgcgctgccttcggcatcaacttgcatggccgtggcttgagacgccagtcttgccgagcccgtggctgggctaggtggcccagtgtccggtggctcatgagcatgttgcatgctggccagccaaggtgtcgcctatacaaaatccaagtataagccgtgggtagtttataagggtttcttgagccgtctgtctcccagccggagatttggagagtgattattacgacggatttgctacgagaaatccgccacgtttatgaccgtagcaaatatcgagattgtgtgggttttggtagagctccaatgatgtactttatatatgtcggtagcagcacctccagttctgtactcgtctggcccacctaagaaacaacatttctatctggccgtcaaaaactattcagaaattatcatttgggggtaaacaatacctcaaaataaaggtcagatttggtgttttcgcgtcagctcattggctgcttgaaaacagcaggattcaaggaaacagagcaagttttctgaatccagatttgggtaacattaggatttttgcgtaatggttacaaattttagcgatatgcaaaatgataggtaccattgggaagatcacttaactgccgatgcggagaatcattgtagagtatgatagcgctcctgtgggcgttgtggtgctcgtatatattttgaggttttactaatcgatttcgtcgatttgccttccagtcgaactttatgtccaatcatatggcttaagtccgatttatagccaatccaatgcgatctgaaaaagttgaggtttaatagaaatgttgtttcttaagtgggccagaggagtacacgtgtacagtagtgcgctgatatgtgaatttgcgcatcactggtgacttctctacggatgagaatttcgggctgtgtacagtacatgtaggaccagcgaaagtgccacctggcttgtgctgcgagcagaaacctgtcatgtacaattccaactccaacagcatgtcattcatgtagctacatgtattgtggttttcaaatattttgccgcccgatttgacttgttatctcggagtccgatttatataaaatggagctcctacatgatcggttagtccaatttagctatatctggcctgagttagtagcataaggctcagaggggaggcattccaagctggccattggccagcttgtgaggtgaggaggtatggccactggccatacctcctcacctctcatgacgcattagaactgcaagacattggggacaatagtacactgtacatagacacttcatagcactatggccagctaaatcacctgtgtgatcatctacggccgctacaacctcgatctgagagggccccagacatgttttcgcggcggtcccttttgccggcgaaaagcggcatttctggcccctgcttcgcaactcgcagcccccagacgcaaatcgggccagatatagtttgcttccctcagcccctcctgctaaatcggagccctccagcaaatcgggcccgatatatcggatcttggaccacccgatttgccaaaacggatgaaagccacaatatacagctgcattacatgtattcttgtatgtccccacttacgagcaaatgcgtaaagtaaagtggatttattggccacggtgcgtggaggatacatattgctgagaacctgcagtcttgcacaatatcctgtgtttgcgctgacaattttaggtctttgctgcacttagtatttactaagtatagatatttctgtaattatttttagcaggcaagaggatggttcgagtcattaattacatgggtcattcctgcacttcaagtcatgttcagcagcagggttcgtaccgcagagctgagtcaactttttaaggcgtagatgtttgctcctcgctatacgggcaacttcaaggtccacgttttgtccgcccaattcctagagcatcgacgtctgtacatacatgtctataggcttcttcttgatcatttgggagctaggtatagctcccaagggcacagccaggatgcggagctactgcatttgaatacatgtatttcgttccaacgttgtacaccttgtccctccgcaaccatagcaaatgtcttcggggagctatcttcacgacgtcccgcgggctcagctccaggtaaaaatggacacacgctttgaggtcttgtctccttccctccttggtcgttaggcacgagtagattgagcgctgaatagtcatagaaactcgaagatgaagcccaagccaggcaacaggaacgagttgcagtgcacgttcggagccaatcaagggtcgtcgagccgtgaggcacgcgtcccgcgcgtgccatctcagcgtcaacattatcaggaggggatttactcgggctccgatatggccgagactccggtctcagtgcagagctttccgccgatagtcaacgatggcgtcggactacgagccggaggtggaaccggcgctgtctcctcctcgttcgaggctgagccacaagcaccgccacgctggtctgtggagatcggcgcttgcttcgacgttgaagttgctcgcgtctctgtgcttcgtgctcttcgttgcgggtcaagcagcgtatgtgtcgccgctctaccgagaatacatccaggccaaggtggcggcgtggtgggagtcccacgaggaaatggtggacccgtcgtatctgctgctggtcggggtgggtcctacgctcacgtgtgtgctgctggttcagtgggtgcgtcgactgcaaacgcagcgcggagtttggtgcgtggccacgctgctacgacgcagaccgtcgccaaactggctcagctacggcgaactgttgttccttgcggtactcgtaagcggcaacgcgctggtcttctggtacgggtataccaagcgtcatggccacaagccgcgattcacgggagacccgccacacccgcagccctctccgccgtcagggtcttctcaatacgtgaagatggtcggcaacgcgttgggcttcaactgcgagttcaacatggcactgctcttcctgccggctacgcgcaacagcgcgtggatggaggctatcaacatgtcgtacgcgaacggcatcaagtatcatcgatggctcggcgtcgctgctgttttgaccgggatcgttcactgtgcgtgttactactactgctggctggaggacgggaggtggcagcaaatggctctgccgtgttgggactgttcgctgcgtgagcggaaggggaggaagatctgggtcaatgtgttcggcgaggccgcgctgctgtgtttcctgttgatcggagtgacgtcgatcccctgggtgcgacggaagatgttcaatctcttctacaatattcatcagctcctgttcgtagcagtgatcttcacgatattacactgggcgagggcgctgtggttcctcctccccgcactcgtcgcctatctcatcagtcgcgtgctctcgcactgcaacagctccactgctgcccaagtcgtgcagttctccgcgctctctcctacactctgtaagctcgtaatcgcgcgtgttccagggcaacgaggacagttccacgtcggccagttcgtgtacgtgaacgtgccggccatcgcgcggctggaatggcatgcatttaccatcgcgtcgtctccgcgaaagtcgttctacgatcaatcgtcttctaacagcatgacgctcgtggtcaaggcactgggcgactggacggacaagctgatggaataccaacaaaagtgtgagcgcgacggcatcaagcctgaggtgtatgtggatgggtactacggagcctcgttgggtcaaatctactccgcgtacacaagtgtagttcttgtgggtggtggagtcggtgtcacaccgttgcttggcgtactggaggatatctgcgctgctgcagagactcgtcagattcaaggtcgaaggatattcccgcgacgtgttgccgccatcttcgtcgtgcgagaactagaactcctgaaagagatgcaccctctcctagcgcgcatccgtgacctggatcctcaaggtcgctacatttccgtgaagttggcgctgacaacgacacctcgacccgaagaattggatgcgtcactttactctaaagatatgtggccggaacattcgccctcactgtacaaaccacaccaagatcgagagtttaatctctctactaagcaaggctgcccgtttggagcgtctctaggctccggtggcattgcaatgcttcaattcgtcatttttggggtcgtcgttggacttttgatgacattccagtttggcaacggtgttttaatcgacggactgcaggatagcgtgtgggtgatacagcttctcgtcaaggcgttcgcgctatttgctgctggtatctgcgtttacggtgggatagcggtgttgcggtggactcgctgggctgaagcggaatccaaatcactaacgccaccgtacactttggagaatgcgggactcgaagagaaccttctaccgcaaactcgacaagaaaggatctacgccggagtgtgcacataccgagacctgctgagcgatctccaggtcgaggttggggggagaccagatctggcggtgcatcttcgggggctacatacagaacatcgccagcgatgcgcaggcggcgggtgtagatctcccattggtgtgttagtgtcaggcccagagagcttgaagactgctgctgctagagctgctgttttagttggtgcgggggactttgacatccgcgaagaagaatttgagttatgaacgaagcgaaaagctgcaattttcgatgaatcttactggtacgaatgcgcgttgatagactgggaaaccatcatcttgtgcgtattctccgtctgctgactggtgtcctcccatagtgctttatgaaattcatttcagagctaaaagaacgacgcgcagtcaacacaccaccggaactgtccacgctgtgccttattcgcgtcagtatcttcaattgttgagtttcatcgccaatttcaatcgaaaatcgggtcggatcttccatttggcggtcatgctcggcttgtagttgttgaagccatgtcgctaccagttcttctcttttgtcttcgtccgaagagacgatcttcacggcggtgtcgatcgcagcgatcagaatttgacagactggagcaaaagttgcaagttcgatgagaagccaaccctcgtagctccatcacgcggctccagtaggaatagatgggcacgtcgacgttgtcccacccgatccgataagtgagaatgacaaaatcatgaagaaaacgctggccgagagcgcggaacggaaagcgcgcttcttcgtcgagcttgaccctcgtgcagcttgtgtgtgagcttcttggcaactgcgcgcatgctcggtagacctcgacatccaacacgagttgatcacagctcagtaggcgaacccttccagaataaagaagaaagcggttaaccaataggctcagttggctgtgaagaagaccaagatttctaagctttgttcaaaagtctcatttgaagtcgaactcacaacaccagtcgcgtttcttcctcttgaggctcaactcaacggagatgtctagggtggccagcagaggctcaatgaactccctcctgccgtgcagcccactccccgctgcatgcgggggtcaagattggttgctacagaggaaaacatggcgataattgagacgaaaagagagggagaagatatcgatatcattattttgcgtctcgtcgctgcagcagacatcaaagcatggtcctagtgtcgaggaagtggagggagctgacggagcacctagtcaagtacaagtaacattcatccgaaatatcgctaaagtcggtatacgttttcttcgtcggcattttgacttattctttgtatgcgaacctttgttttatcgatagaactgatggaacaagttgagcagggataaatagctaattcgagctatgtcgaaattttgcgtttatctgaccataatgtagcgtacaaatatagattaccgcgctgagaatcattctttcaagaaaaatactgccgggttgagtgtgctaaaagcgtcaatctttcattttccatcatttgccatctacttcgaagtacaagataaccgactacatcgccactacatgtacctggggcggatcttggccttggaaaatggggtggcagaaaaaaaatatggggggggcggggcggggctggggtaaatggtcagaatccagagcaaaacacggctgaaatcggctaaatcgggtcaaaatctcaaaaaaaatggggggcatgcacccccccccccattttgactgaagatccgcccctgactcgagctgaagtacatgtacgggcaccgtcacaacaagcgccgaaggcatcggacactgtactgtgtgactgcagcaaacagccacggagaaaggatgttgcgattgttcacttcacagcctaacgttaggggctggtcgcgctggctcgtgctggttagtggtgtgtctccgtattgagggcctcaatacggagacacaccacctcaatttgaggcacgtgctggctgtgaagttgttgtcgatggaaggctattgtggtacacgtggtgtaatagtggggtccgattggtagagcccaagattcgacacttctgattggctaatagaacggcaagttgaatttgcctttctggatcagctttgtttttggtccccaatgaggactgcactgtatgcgttaatatcttcaatatgaatcgagttaggtcgaactaactaccaatattacatgtatacactagatatcatactacgatattctcaatgtagcagagctgcagctacaactaagattttgacaaacgcagccagaatttcgtgttgcctgtattgtatccgttgttctactaagatactgaagaaatataaaactcgattgtattttataactagtaagaaacagcaagcgtcgatgtatgtatcttatgagctatgagtatattatgtcgggtaggtagagtagatttttttataaggacaaatataatccacgctgttaacagtgtcgtggttcgaacggcttgaagcaatcccttcatctacgtgagatcggacctcccccgtcggtatatttatgatctctgtagcggtagccatgcacaaacggcgccgtcggagcagtggtctcgctcaccaaccgactccttcggcgtgcaaatctttatacttgaaatttgtatgaaatgcctgttaaacccgtcgtcggaaaacgtgccacgactcagcggcgggcgaaactcagttggtgacggttctgtcactggcaacgaaacagttaaatgactggttagaagagactgcagcttaagaatcacatccttttacactcaagaaaaggcaacacaaaataattttccatttttcagtctcccaattgatctccaaaaatctaacaaaccacggatcttacgatgacgccgacgacaccgtacgaaagctcgggctgcaagcagcgagcagcgagcagcgttaccgtggcctcgctccgtgtcgcagtggcctatcaaccagctctccgacggcgactcccaccttccctgcagagctcgtccaagtcgacaatgcgatcaccaaggacctccaaaatttggctcgtcgtgcgaagtctgctcgtgcataaggaggtcgagcagcgcagccgacggcgctttcttcatgcatgctaagccagtcacatcgcgttcacgcgaacacgtgcgccgctggaccgagtcgcgggtgcaagaccaagatgtcgccgaacttcatgcacagctagcgggtatcggtagcttgacctggaccgccggcctgtccgtcgcattcgccgacaatttgcgctagcgacatctgcaggcttaccgagtctcattggcccgaggcacgaaccgcggacacctcgatggaccatcgcgcagtgatccggcgtgtgtccttctgttcgagcggctgttggcgtctcaaagccgggcgagctttaatctgctgcgttattgtagtaaaatgtaccgcgctggtggccagccatccgcctggacaagggaaagtggcttgaacaggtcgacaaagccgccccgagcacatcacgaggatctcgcgttgcgtccggacgaaggccccgagaccgactccctgatatcgagcgtgtacacgtccagataccagcaaggtgcgtgatactatttttcttgcattgcaacgcgtgcaatgctgccgctatcggatgtggaggggagctcatcaggagaggagggaaggcacgcgcccttggaggcgtcaagtgacaggcgagggggctcaaccaccgagacgagcagctccagtcgcgcatgacgcagactcactcttcattctgcgcagcgcgcaacaaacgccgcctgcctcctccccctcacacgatggcgaaatggttgaggctgctggcgctcgtgacggcagcggttgtcgccacctccagccccacagcagaggcgaagacgtccgtcgtagtcactcgcacgtacacacccgcgacgcggacgccgtccgtggtcgccactgtaaggccgccgtcggaggagctcgacgatgactcggacgacgatgtcgccgcggccgctgcttcgtcaagatcagttagcgcgagtgacctcgactcggaagacgacgacgatgatgagggggaagatgactcattctcctccggggggtccttggccatggtccccgttccttcgaacatcaagatcggctccaccgccggcacgaaggacaagatcgtgtccacgtaccgcaactgggtgggcccgagcatcggcaagccctcggacccggcggccgacaaggcgtgctggcgcaaggcgcacattatggatacctgcccgtacggttacgactacaacactaagatgtgctgggccgagtgccccatggcgttccccgtcgagtgcggcttccagtgcatccgccagaacgacgactgcggctccgagatctacgccaagttcgtgagtgtggccaacgccttcttctcggtgcagatcctgggtgtctttggatccttcgccaagctctccaagacggtgcgcgtcggcatcaagtgcgcgcgtgccatgttcggcacgatccgcgctatcgtcaactacatccgagcgctcaaggtgtcggacccgcagctggcggaggacaagatcctgctggccctctaccagacgagctacatcaccatcgacctgcctgtaagtatcgtcatgtgcatgggcaagtcttacccgtgggaggtgctagaccccgccagtgtgctcattggcacggtgcaggtgatgctgggcgagatcctggcccgccaggacaacatcaccaagtcctggggcaagttcaaggccttcctcacgggctccaacttcacgtacgccgtgaacgacttgaacgagaccgagatctcgtcgctcaagaccggaatggagtccaattccacgtgcggctacgagctgcagcggctcacggaccgcacgtggcgcacgatcgccgagatgaagcaggagaacccggagatctccacggacgacctgcgcgtggccgtgtacaagtcggacttgatgctgcacgacatcccgacggtcaccaacaactgcatggaccaaatgatcctcgagtcggacgaagccacggcctacaagacgcgcgacacgctgcgcaagacatacggcgtgatcgtggacgacttgatcgacaagggcaagagcgacaacggcacgtcgctcacggccaagcagtacacacgcgtggtggccgacaaggtcttgatgacgatcgccacgctcttctacatcgacctcacgcgtatctcgggcatgctgtccgagtacatccagatcatctgcgggcccacgcagctcgtgggcgagatcgacgacggcacggacgacaacacgcttggactgcggatcgtcggcgccgccttcaagggcagcacgagctcctggaagcgccggggcgacggcgtcgtccgcatcaccttcgtgagcaccgacaccaaggacgtgacggtcaacatcatctcgggcggcgacaagttcgacgagcaggacgtccccgcgggcaagaccgtgacttggacatccaacgtgacggcgctgggcggcaggacgctgtaccttgatcgctggcggcctgggttcctgggtctgccgggtaccggcggtgggtcgttgaagctctgggtgcctcgcgcgagcgaaggcggccacctcgacctcaccgccaagctcaacgtgagctagctagatagagaaactacctataacttagaagtcgagtagctacaaagtgcagtgctaagcaaattaattaatggcaatgagtgaagtgaatcaccgattgatcagaagttacagtgaagcgagcgctgcgtgcctttagtgccgcaaaggtaccgaacgttgcccgccggaagccatggccctcaacgagtctcgttgagggccgcgtctcgttcaacgagacgcgacgcgtgccttccggcggcacgagccacagcgttgagaaggtattggcgcggacgatctaatccagcgagcagaacgcggtctctgcgcggtctctgcgcggcccgcatcgcctcggatttggcgccggggcgtgtggctttcgccaataggcagctccgtgatacattcaggatcgtgaacacccgtcgtcggacagagcgcagacggttggctccggcggtgtcttcgaacaccaaattgatgtgggtggggctatcctatccctcaacaatctcctcgccgcattggaggcatgtgataagctgactgtgccaaccaccgcggaaacgttagacccaatgccgagtacatgcatgtacatgtgcgcatgaagcgttcgtggcagcccatagatgaatggagggcggggagggaggcatgcgttgagacgaggaccaggcctcgtcgtcatgtgaagtgatgtctgtctgtcagtctgtgcaccatctggttacggagtaccgccgaagatacacttcagactgaagttcaggtaatttggtcggcagtgaagcccgcaccactgggaagcaatggccgccattgcaatgctggtgaatctgcaccttaatgccaatgtatgtcgtgttagaaacaaactatgactttggtgtgagccaaatgctgtggactaaccatgaatcgagtcgataaaatgatggcattggagtgcacagtagacagtttgacgtgaagacgtacatgtacacacagcactggagtggcagggatttcgcgccgacctttgtctggttcggcacgcttggaacggaccagcagaaccgggcattgcctgcctacttaagtagttgacaagtccgaccagtccgcctcgttttgacaggcctagcattgctagtagcaacgcaagatcggtggcgacgctattggcggatggcacgaggaccgccgggtgtacggagctgtgtcgccgatacgggtgtcaagatttgacacgaaagcacggtttcgaggcccgcagcgcagctggaagccatcgtcgcagtcgcagatccagcgcggcaaacgccgccacgtccgcgctgacagtgtacagtaaatgcagtggcgcctttcatggtaaaaactttacgccgtagaacttggcccagaggcagccttcgcccacgcaagtatgcattgagaagtaggttctctacgctgtacctagctgtgttgttgtgtatcctagctccactggagtgcagagggataacgtcgctccacgcaagtcactccgattcgtgttcgagcaaagatcaccctttgacgttgtgctcttgagacggctccactcgtcaacacaataaccctcagcaagcacaacctaacgtgtaataagagctgccattggcccaagggcgtgtgccttcctccgtacgtgagcaggtggtccagcttttgcgtgcatccgcctttcgtccgctgccttttccagccacttggttcgtctcgacagtgtcgagtcgagacctctacactacggtgcgagccgcaccaccacccgaggtctgcaccatttgacagcgacaatggcagcgactgccaaaacccgagtcattccgcaacttgccttcgactgaacaagtcaagtcccaatggcaccgagcaacgcggaaccaacggccacccctcgcgtcgacgcggccttttcatcgctcaagacgcccgatgacaagcgcaacagcctcgtgggcgagcctcagctggctactccatgggccagccgcgtccccattgtcggcaacctgctgcaggtgctgatggtggcggccatcgtcgcctacgcgtacggccagctcttctacttctcggacacctacacggatctgagctcgactatcggcacgtggttcggcgttcctgtcggcggggagaagagtgcgggcggccactcagaaatggtgcgacccacgtacttcttccttgttgcgttcctgccgatcgcagcgtcgctggtgtttctcgaggtgctgaggcacttcaacgtgcgtcggatcacgtcacagtcagtcctcagtttgactcgagtgctccgtcgtaagcctcgcatcttcgggtgggtggcccgggtcagctttggcgagcttctgttcctgctcttcctcattggcggcaacgtctacgtgttctacaactactacgtccgccgcgtggagaagatgcacaagaggggccgcgagttcaacttcgagctgtacctggagatggttgcgctcacgctgggcttcacttgcatctacaacatggccttcctcttcctgccggccacgcgcaactgcgtgtggatggagttccttaacatctcgtacgccaatgggatcaagtatcaccgctgggtgggcgttatcaccgtcttgacggcgctgttccactgtatcgggtactactggtcgtggatccgacagggggagtggagggagaacgccctaccctgcttcgactgcgaagtcggcagcaaggagggccacgacccgtggatgaacttcttcggagagatcgcgctgctggccttcctggccattggcctgacgtccatcccgtgggtgcgccgcaaaatgtacaacacgttctactccgtacaccacctcttcctggtcggcaccatcttcgccgtgctgcactataacgccatcctcgcgtggatcttcccgtccgtcatgctttacgtcatctgccgtgcgctctccagctccaacgggttctccccggtctctgtccgcgagttcacgacgttgtcgcacgacgtggtcaaggtggtggtggcgcgttctaccgcccccgcgggcgacttcaaggtcggccagttcgtctacatcaacgtgccggccatctccaagctgcagtggcacgccttcaccatcgcgtcgtcgccgcgctccagccccgactcgctgacgatcctgctcaagtcactcggtgactggacccaggagctcgtccagtactcggaggactgcaagaaggacaacgtgctgccgaccatctacgtggacggctactacggcggctcgctcgagatgtacgacgagtactcgaccgtgtgtctcgtgggcggcggcatcggcgtgacgcccttgttcgccatccttgaggacatcgtgaccaagctgcaccacggcgagagcatccgccagaaggtcttcttcatcttctcgttccgtgagctgtcgctgctggaggagatccacccgctgctggtcaagatcaaggagctggacccgcaggagcagtacttcagcctgcacttcagcctcacgcgcgcgccgacgaccgagcagctggagaagacgatcgaccacggccgtctcgcgggcaagccgcacgcgtctgcggttcgctatgactcggccaaggtcccgacccctttcgctatgtccgtccgctccggaaccagtcgagtggccatgtacacggcctcgttcctggtgacgctcatcgtcgtggtgctcgtcaagtacggcaacaaggtgcaggccgaggacgagaatctgtggcccctgcagaacctcgtggagatctcgctgctcatggtcgtggcctttgtggccgtgttcgtgagtatcgcgctggagagcaagacccgcgtgcagaagagcgattcgaggcgcgcgtacgacgtggcggagacgccccagacgacggtatctctcgctctcaacacggacgtgcagacgttccaggacctcatctccgagtacaacgtccaggtgggccagcgccctaacatccccgagctcatgcagaaggcgctcgagggccacaaggagctcacgtcgagtgacccgtcggctgttgttccgggcaactcaacgatcggggtcttcgtgtctggcccggaggagatgaagctggcggtcgagtacgcaatcgctgacattggcgccagccactttgacgtctttgaggaggagttcgagctgtaaggtgacgtagaacttgaagtagctgtgtagctgtgcatttattttgaatttacatcatatcaaccggaaagaagttgcttagcctcttatccataggagaatccgaatcgaagttggtgcaagtgagaattaagattaaacgccatgattccacggcctgaccgcgcaatgtcgattcatctctgtggcgtgcaaaggcatcactttagctgagaccgtgcgcgtttgagtagagttgagggttcagcatcagtgtgccgcgagccaatgactcatgctgagagttgcatggcactttactctagtatgcggcttggaaacgaagaaaaggtcagtgtgagtccagaagcggcgcgtgctcgatgtggttccggcggagatacagaagattggcttggaagacaactccatctcaatctttagaagaactcgtttctacaaacgttttcccataataacagataccctccccgtctcaaagtacgacacttattacttttcatcagcacacaagatccacggatccatcccagcgttggtcgccccaacagcaccgaccgagactcataatatttgcagtcatgtctgcctattggccttacttcgtgttctcttcttgacaattactggcgatcttgcgaggagatcgcaatggccttgcgactagcttttcattggggcggggcacgcgcgcgagtgcaatggctcaagctgaagctctgagcggatccaaaattcaagttcagtttggcaccgcacggatctcaaccgccgactcgttactgcccctcaatctgcctgaacccccgcaacagtgtactgctaacacgcagctattgcgaaggttgtaatgtattcgattgcgcaggaagcaaatgtacgtcgtgtactacagaatgcagggactgtcggtttaatgtattcatgtttgatacactaacatcaggtcgttcaccaccagagtgtacttgaccatcattgctggcaccgttattttctggctgccaacttggatcagttagccggcgtctttcgacggcaagtcatactattttctggccaaatacgctgcattatttggcagtcaacaattgcatgaaatttccgcaaccgtttggagatcgacttgccattggcccaagggcgcacgctcaacgacactggacggctcagcaatatgccgtttgctcgtacgcgtctaacggctcaggctcggcgccatagaaaacataaagtggagatttcagatctccgcgttgcaagccaccgggagcgcgtgctccagtcccctttaatttgcggtgaatcgacgctggcgatagccctacgacgatatctccgatgcgattcctagtcactgcactgaccattgttttacgaatgtccgttcctccggtgagctctggccgacgatatactcgagcaggcagctcattccccaatttcctctcgactgctcacctcagccagccaccggtagcctcagttcctgacccgagcccgccatggcgccaagcaacacgatgactccgcacccggacgtcgagttcgcccacatcaagacccccgcagacaatctgcaggacaaacgcggcagtcttagcgccggtcgtgcctttggcccctccccttgggccgaccagttctcgttcctcgggaacctcgcccaggtcgtcatcttggcctccatcttcgtgtacgcctacggccagctcttctacttctcggacgcgtacacggacacggtgggctccaacattggcacgtggttcggcgtccccgtcggtgggggcaagggggccggcggccattcagaaatggtgcgtcccatgttcttcttcctcttctgcttcatccccatggccgtgtccatcgttctcctggagttccttcgccactttaacgtgcgtcgcatctcatcggcctacgtgctgaacctggcccgcttcctgcgcctcaagccgagaatcatgggccgcgtggtgaacaagagtgttggagagctgctcttcctcggattcctcgtgggaggcaacatctacgtcttccagtacttctaccgcgcccgcgtcgagaggatgaagacgcgtatgcccgacttggacttcacagcgtatctgcagatggtcgcgctcaccttcggcttcgtgtgcgtcttcaacatggccttccttttccttcctgcgacgcggaactgcgtgtggatggagttcctcaacatctcgtacgccaatgggatcaagtatcaccgctgggtgggggtcatcacggttgtgacggcgttcctccactgcctcggatactactgggcgtggatcaaggagggcacgtgggtgaaggaggctctgccctgcttcaactgcgaggtgggcacggagggcaaggacccgtggatgaacttcttcggcctcatcgcactgctggccttcctggccatcggcttcacctccatctcctgggtgcgccgcaaaatgtacaacacgttctactcggtgcaccacctcttcatcctcggcaccgtcttcgccgtgctgcactggaacccgattctggcgtggattttcccgtccgtcatgctttacgtcatctgccgcgcactctccagctccaacgggttcacccccgtagcggttcgagagttcacgatcatctctcacgacgtcgtcaaggtggtggtggcccgttctaccagtcggaccgggaattacaaggtcggccagttcgtctacctcaacgcaccggccatctccaagctgcagtggcacgcgttcaccatttcctcgtcgccacggaccagccccgacacgctgacgatcctcctgaagtcgcttggcgactggacggaagaactcgtcaagtactcggaggactgcaagcacaacaacgtcctcccgaccatctacgtggacggctactacggagcctcgctcgagatgtacgacgagtactcgaccgtgtgtctcgtgggcggtggcatcggtgtgaccccgctcttctccatcctcgaagacgtcgtggccaagctgcagcaagggtcctcgatccgtcagaaggtctacttcatcttcaccttccgtgaactgtcactgcttgaagagatccacccgctgctgatgcagatcaaggagctggacccgcaggagcagtacttcagcctccacttcagcctcacgcgcgccccgacgaacgaccagctcgaccaggagcttgaccatggccggctcgcaggcaagccccatgtgtctgctgttcgctacgacacgtccgtctcgtccaaggttcctcatccgttcgctgagcctctgcgctcgcgtaccagcaagctgaccatgtacacggtggtcttcttcctcacgttcctcatctggatcgtcgtcaagtacggcaacaaggtgcaggcggacgacgccaacctgtggcccctgcagaacttcgtcgagatcacgctggtgatcgtcgtggccatgctgggagtctacgcgttcgcgttcgttgagagcaagaggcacaaggaatcgaccgctgcgtccagccacctcatgacccccgggggcatccagccctacgccagcgacgcccacacgttccgcgacttggtcacggactaccgcgttgcggtcggacagcgtccgaatatggccgaactcatgcgcaaggtgcacaacggccacaagcagtttgcagcctcccacccgggcgtcggggcgccggggaactcgaccgtcggcgtcttcttctccggcccgggggcgctcaaacacgcgatggagagcgccatctcggacattggcgtccgccacttcgacgtgcacgaggaagagttcgagctgtaagagcgtccgagtcatctccatttgtcgcgtggactttcgctaagcagacgcagtctttgagcaaaaatgtgctgaataaattctctctccaatgtcagcatccgatacatttcccttaccacttgaacgaacggaaatacgaggacttctgagctgctctacttgaagcttcttcaccttagaaaggctgtatacagcgtccaaggcgtgcacccggcctaattataaaaaagtcttaactccacttgctgagagcgactcgaatcgttcacagacgatgtcactgaggctgacctcgtcacgttcgggacgagtgctagctggaccgccgccttctctcatcccgcgccgcgcgcccagatctaacagcgtgctatcgagctttctaggcgtcttcactcccggtttgtgcctgacgctgtcgcccgtaaagtttcgcatagcgtggatcggaatcttcagcacccacgccctctgtgcggccttcttggcagggtcagcaagggtttactggtacctcacgaaccccgtcatggtgtactacgtgcagaattgggccccgaccgcgaggaacgagcactacgaactttacgcgctaacgctggcgctcgtcggtgtcttgcattttgtgcgaattctagtagaggcggagccagcgttaaaaaaatgggggggggcatagatttttttaaagtaaaatccacaatctacatttcgattcttctttttgtcatcgctttgaacttttcgaggaccgagtctttgtcgatgctgtttgtaagatcacgctcgatagccaaaaccatcaggtttgacatccaaagatctcccattgttgttctgagccgcgtcttaattcttttcatggctgagaaagacctctccgtagtagcagttgttacaggcagcacacacaccaagttaataattcggtgcaaggtcgggaacagctcgttgttatcggtcccgacgagctggatgcatagttgttgcgttgtcttcaatttttggaaccttttgtcgatcgttgccaaattgcgaaaccgagtggcctcttctcgaaggtcgtccagctcatcggtgaaatcatcgggataaaatgttttagccagctcaacaattttagtagcgctccaattcttgaaattatcacgtggactgagcgatccgcacaattccatgagactaagaacttctccactaaatcgtgaatccatttcagaaatcaggtcacgaagcatacagttgtatacttcgtcacgatagtgagcttcttgtgtaggctggacaccatccctggaggagtccactcctggaattccagccctgccacacccccgacttctcattacgcgtcgtttccacacgtcatttttgtcaggaatgagaggggtgtcgtcaacttgtattgatttgcaaaagttgaccgatgagttccaaatcgattcaaaacttggcgagttcctagtcatagaactatcatcgagcatttcttttagttctttggatacctgcttcgtcatattcacagctgacacgatatcgacgtcatctttctgcaaaaattgggacagccaatttgttttccccaaaactgcagtgagaatctccatatgaaatacgaagtcgaaagtccacatcttctctaaaattcctgacgcctcagcgcgtttgtgggagttcacaccatcgaccactacacgctctaacacacttgtaattgcggcccaaagcatcttgacttttcttaacgcgcgaatgtggcaattccacctttttttgctaagaccctcggtagaagttggttgattttgggcctaccttggctcactactacggcttacacgtatgcgcacgtgtatgaggaagcgtaggtttcttttacttgagttaagtatactcgagatccacgagtatactttaaacaagataaagactccaagtagcgggttttggtaaaagatgagaactgatatttttgttttatgtttctgacttcctctaaatgtaatagtctaagttaggaatctgccaacggctggttggcagaattccaatgctatgcatgtcgctcattggctaagagatgctgctctcagccaatacgaatcctaagtctctatggaccacccgtcgtggtggtcctaaatgtatgtagcctttggtgtgtcgccatgcagcttgcttcatccaacagaacagaaaaatatccatctgcaatctcgacctccataatatgctttcgaacaccatcagccgcacatttgatcagttcacgttgaatttgtggcgatgtgtacacagcgttttccccagctaaggacattgcgcgagaaaacgatggcgcgtgctgtgccatgaactgaacaatctcaagaaaattgcctttattttgtgacgtatctgtgcattgtaaaaaaaacgttagtccagtgatgtcatttcttacataaaaattaaaccgctcgtatagcttttcgtcgctgccccgaaatgcaatttcctgttttgctaggagaaggcagatctccagaataaaagtcaggcgctcccggttttgttgtcgttcaccaatcttttgagaattcagagccacaccaacgtcattctgacaggatctccgattgtcgaaatcgatcagagctgagtggtgcttcgagctggtttttgtcccaacatgtttcgcaaatccgtcttttgtagtggcctttttccagttcctatagcccgttgtaggttgtgcatacactgtgagctcgctttgctgcgtcattacttctcggctgaggtagcagcataagcaatacaccgcgtccgtcgaaggagactatttgagccatgattttttttcaaaccactgggcccgaaaagcacgcatgcatccaccgatgtcacgggccggatattgcttgagttgcggttggtaaggaccgaggcgaacgtaggattgtataacgtcacgcagtagctgcggatcggcaatcagttgcttaacgaaaaataaatttggtggtctgtgagcaggatcccgcctaacaaagtctccagcggaacattcttcggctctatcaggaattttgttgagcgaacaccattccaacgctgcttgctcttgtttttcgcgcagcgttacaggttggggtcgtggcccaggatctgattcaatactgcgggccttgtcaaagtcttcgggctcttgacggggcttcttcacaaagaaggtcgtgattgccggctgcttcctctttccttccatgttattatcaactaagcggaggaacagtgtgaacttcatgcatgtgccgtctaaataaaaaaatctaaaaaaatcgaaacgccttcgccgaaaaatgggggggnnnnnnnnnnnnnnnnnnnnnnnnnnnnnnnnnnnnnnnnnnnnnnnnnnnnnnnnnnnnnnnnnnnnnnnnnnnnnnnnnnnnnnnnnnnnnnnnnnnnccccccccccccattttggccctggctccgcccctgaattctacagatcagctgtcgctcaattcaggccaagcgactcgtgttccgatcagaatctcgaagtacaatattcccaactaaacttcagatggctaagcgaacccagcagtcgagtttaaggagaccacgggatcaaaatcatcgagcattatgcagttggttggtacacaagagttggagtgcactattctcaaagcgaggcttcttcggtgtcgaaagtgactattttctccaaatgttcgttgttcgagagatggtggaagtggcttctcaaacttaccaggcgtactggtccagctatttactccacggactgtggtttaacacagtattggttcttcttctggtgacgaattgctggtcgacgcctgccgtgcaccaatttctcgctgccacgcctgcacacgagcgcgtcgtcgttttgtgcgtggacggcgtgatttgcatcgttatgagcgcggtgatcccctctgtcatcatggcgccgtacatcgcgggctttaacacctcctacttcatgttcgatacgccggagctggtgtacgacccgcacttcatcacggcgttctcactggagaaccagctcgtgttcgcgacaggcttgatggactttggagcgaagcttgacccgcacctcgctacgttcctgacgctcatttccatagcggagttgctcactagacagcccgattcgactgcagtgggtatttacccgtctccagccccaagctcctttacgtatcggtctgagcaagatataattgtgcgcgaccctattccttggattcaaattgtcgtaaagctaattttcttggcgtggggggctgcagttctcgtgttgtatctgcacagtatttttcacacacattcgtctactttagttggctgtctcgcatctactcgaccatggttttcgcgtcagatctcgtgctcaacgctagttattgactgccacgctcgcggcgtggcttcacctgaactttacgcgtttgacgccctggagtcggctgcactggctgctatttcgtttacgcactgtcccgagcttcgaattccttcggctattcaacagttcagcaatttacgagtgttgcatgtttacaactcgactgtgatggagtggtctagggaggctggcggcatttccccgctagcacaccctcgaatgtcagagattgtggtcacccgttcttggtttccgttcggcttcccgcaaggccttttacagccccttcctacctccatggtcagtatttgcttttcaatcaccgatctggctgaactaccggataatttgcatctgtattggcctccgatggcgaccgtggtgtttgaattcgcggagctgacgacatacccaccatcgcttttgtcagtaaaggcctttgcgatctccctaagaggaaacaaactggaaacgatgccagagttagcgggggtcgcacctggtaccgttttacccgtgttttcgctggaaggaaacccgctgaaagagctgccggcctcgttatggtcaacgagcatcttcttcggtcgtctgaacctcgagaatagcaacttgatcgcattacccgcgtggacagacacgcaggtattggacaccatgtatatgtacaacacaccgtattgcagggagatcgctgccgaacaccgtaagcacaacgttcagtgctcctttcaccctgaaaggaaccttttcgttgagcttccgtttcaactgattgacaagctgtatcggctcacttagagccctacagtttgtgcaatgtcctgccgcgcgtagaacctatcgggttaccccgatcacgacaatgcattcttggtcatttgaagagcactccgaatatctagggtctcgatgcttcccaatgtgaagaatgtgaagttaacatgcaggttgggtagggaatgctgggtaaattcaaaataaaggcacagctacgtcaagttctacgtcaccttacagctcgaactcctcctcaaagacgtcaaagtggctggcaccaatgtcagcgattgcgtactcgaccgccagcttcatctcctccgggccagacacgaagaccccgatcgttgagttgcccggaacaacagccgacgggtcactcgacgtgagctccttgtggccctcgagcgccttctgcatgagctcggggatgttagggcgctggcccacctggacgttgtactcggagatgaggtcctggaacgtctgcacgtccgtattgagagcgagagataccgtcgtctggggcgtctccgccacgtcgtacgcgcgcctcgaatcgctcttctgcacgcgggtcttgctctccagcgcgatactcacgaacacggccacaaaggccacgaccatgagcagcgagatctccacgaggttctgcaggggccacagattctcgtcctcggcctgcaccttgttgccgtacttgacgagcaccacgacgatgagcgtcaccaggaacgaggccgtgtgcatggccactcgactggttccggagcggacggacatagcgaaaggggtcgggaccttggccgagtcatagcgaaccgcagacgcgtgcggcttgcccgcgagacggccgtggtcgatcgtcttctccagctgctcggtcgtcggcgcgcgcgtgaggctgaagtgcaggctgaagtactgctcctgcgggtccagctccttgatcttgaccagcagcgggtggatctcctccagcagcgacagctcacggaacgagaagatgaagaagaccttctggcggatgctctcgccgtggtgcagcttggtcacgatgtcctcaaggatggcgaacaagggcgtcacgccgatgccgccgcccacgagacacacggtcgagtactcgtcgtacatctcgagcgagccgccgtagtagccgtccacgtagatggtcggcagcacgttgtccttcttgcagtcctccgagtactggacgagctcctgggtccagtcaccgagtgacttgagcaggatcgtcagcgagtcggggctggagcgcggcgacgacgcgatggtgaaggcgtgccactgcagcttggagatggccggcacgttgatgtagacgaactggccgaccttgaagtcgcccgcgggggcggtagaacgcgccaccaccaccttgaccacgtcgtgcgacaacgtcgtgaactcgcggacagagaccggggagaacccgttggagctggagagcgcacggcagatgacgtaaagcatgacggacgggaagatccacgcgaggatggcgttatagtgcagcacggcgaagatggtgccgaccaggaagaggtggtgtacggagtagaacgtgttgtacattttgcggcgcacccacgggatggacgtcaggccaatggccaggaaggccagcagcgcgatctctccgaagaagttcatccacgggtcgtggccctccttgctgccgacttcgcagtcgaagcagggtagggcgttctccctccactccccctgtcggatccacgaccagtagtacccgatacagtggaacagcgccgtcaagacggtgataacgcccacccagcggtgatacttgatcccattggcgtacgagatgttaaggaactccatccacacgcagttgcgcgtggctggcaggaagaggaaggccatgttgtagatacacacaacgcccatcttctccacttggcggccgcagtagtactcgaacacgtagatattgccaccaacgaggaagatcaggaacagaagctcaccgagactgacgcgcgccacccatccgaatatccgaggcttgcaacgaagcacccgcgtgaggctgaggacgtagcgcgaggtgattcgacaaactctgaagtgcctcagcagctcgagaaacaccagcgaagccgctatcggaaggaagccgacgatgaagaagtacgtgggctgcaccatttccgggtgactgcccgcgctctcgttcccatcgacaggaacaccgaaccacttgccgattgtcgccctcaactcgctgtaattcttggagaagtagaagagttggccgtacgcgtacacgactatggcagccacgatgaatacttgcagcaggttcccgacaattggaacacgactggcccgcgaggttgcaagctgaggaggctcgcccacgaggttaataccgcgcttgttatcgggcgtcttgagcgatgaaaaagcggcctcaaaacgaggcgtggtgggcggttccacggcgctcggtgccattgcagactcaagattggctcaggcgaaggtaagttccggaatggccgagagcctgccgggtttgtgtttcggcagttacagcctgtgattaaacgatgtacagcacgtgcccatgcactcgggtggtcgtgcgaggtgtagatgtgtcgtgaaagcgactggaaaaaaaagacaatccgaagtggttaacattcgtttacagtaagtactgtacactgtattgtgcctttctgccaaaacgccctccgatttgaggtcctacgtaggacttttgctcctacgtaaggtctcataaaagttagtaccgaggacaataaaacctgctataaacaaaaactgaatgtaaactgagcgaatgacttgcacaggtaggccgacaagtcagcgcgttcagtaccgttatacctgtagcacatgtacgtagctccacgctgagcacggtgacctgggtgcggtgctgcctgagtctccgcctgtacgagtgtgtccaaactatgcatttgccacagatgctttcatgcgcactggcctgatccagtcctacgaaggacccgttagtcctacgaaggtccaaatggccagcttaactaggccattcgggccttgtttccaaaaaggtaccctttaggtgaagacggagctcctacgtaggactttcgtaatccgaagcaaggccaaggaaaagagggagaatctcagccctccatttcagaaaaccagctcggaccgcgcagccacctcctggaaacattacgatagccctacgcacccgctgttaaagggtggggcaagccaagcgacttcacgaattacgtaagtttgaccttgcttcttacaggtgtgcattaatgttgcttgttatatgtgtattaactttggtaatttgttattgtttatttggtaatgtattaaggctgttaaggaggcggtaaaagcggcaggatgcctcgtacgggcaagctgaacgcattggcatcggagatggtcaagctgcgagagtctgccccccccccctcccgcgaatactaaatgtaacgttgctctgcgctctattgtctgctaatgttgctctatgattgataactctgcttcattaatatttatgtctctatgttgttttgacgttggtattcagcttcaagctgcgcgccgcgggacgacaaggacgtgcgggccgagagggaagtccacatctagcagagtaccgatgttaccaaaccactatcattgtccaggtccccaacataatggctgctgcttcgtgttgcttgtaattatgttctgtaatttccgtacacctatacgattgtcgtcctaaacgttcgcgatgcatttgcacccaagcgcttaggtttaatcgaatgaggtcgacactatacgaaatatcgccgagtactaacgttgcttctcaataacgttgcattatgattagcgttgcgcattaacgttgctccaagataacgttgcgttatgtttagcgttgcgcattaacgttaatccaagataccgttgctttatttttagcgttgcacgttaacattgcccgttaatgtgatttgtcctactttatagttatcaaccgccaaactattcaattgtattacctgggtcagacgcatccgccattacatgatcgctataaaacttagcaaagtactttacaataatgagagaggatagcactacggtgacttagccagcgcgtagtataggaagcatattatatggaggcaggatcacgcatctgcatactatgcctataaatatattgagtccatttttaagaaaacagcgatgtataccgtatgatttagaacaagatcgcaatctactttgatatcactgctattaactggacgtcccttcaacaatgtacgggaatctcgggaaaataataaatccggtttttcctggcgagtctagggatgctgaaactttgcatatctactaatatgtccatcataggagtaatgccaaagtggcttctccttttcttgtcccgttcggcaacgaggacatggtgtacattcccccttactatttgtcagtcatcttgtcgctagtaatgcgcgatctttcacccctacctgaaaggtcacacaaatacatataactttttatatgctgcataaataacggtaagaaacatcgcagaggcgccaggcaacgccaactttgaggataaatcgctcgagatctacatacatttagcgcttcatacagcggcattacccaaactagatgcagggctttctatccatgtcggtctcaacggcgatgttcctcttattgaagagttaaattcgccgaaatcacaggtttccgacctgtcatgcgcattcatgaagggacgcccagttaaattacagcacacaactgatgaggaatctgtttaacgcttagcatggacatgtcggctagaacctgcgacccttctggtagattaactgtgacgatacatttatgcatcacctcgataatgttaccctagatgagtttgataatagattctacgtccatttgttgcatgtgtcgatgtgtggtcgttattgtacacagtaattcgtaaaatataagcatgaacagctatggtttatcggctaagcaacaggcaacaattcaagtcttacgctgcttaagttccaaattttacagcgacgttaaccctttagctacgagctttaatggttcttgcgcaacgttaaatgttttacctaacaattatgatgcacgattgacggtagcaccaatcgtacaaagccttttacacttcatactgttaatatattgaagcctatttattgtaggtgaagtacacgcaacctggcaatgtagtcattgataatctggcggatgcagtaagtcgggggcaatgagagtataactgaatagtaaccgaaggtaatagacgtgcacctaatagttttattttatagattctgacacgactttatacagtagacgcggaacttccgtagtagacgcggaacttcagcgtctactattattccagattttctgagaagaggtcaactagtttgtaagagaataaaaaaaaatttcaatgcacgttggtacagcattgaatgcataatgaaagtatccgtacactcacaatatcataatgctctaaccagcgacgtggacctggtatgttacttgatttatcagtagggtttgctgccgtgcaatactgtcaccaacaacttacctcgaagaaagttaatgggcgatgtgatcgaagggcaacgttagcgggcaacgttactgcgagagcaacgttatcaaaagagcaacgttaatggttacgaaaaaaattaatggtcacttttgaaacgcttttacgagcgcttgattagttatatactcttacaagaagaactatgtctcgttgtcgaagaagtacagcccagaaaaccattggcatccgcgataaaacgtacccatgcagagataaaaatgaatccgaacaccagagtattcacatttgagcctctgttagcataatttgcgctcacaaaagtgtactcgtggtgtgtgccacttcagaactctcccaccctcacatctgaagtcctcagtgagcggctcaatagatttgcgcacctcgtgagcctactatgtactcattcagcacagataatacctcagaaataaattacctatgtgcaacacacgaggaatttatccgataaattacaagtccgaccttgtcctaccatgtacccatgttgctaaaaacgtcgcaataaggccaatgatgactgataacgttgcaggaacgccatcctaccctagcacctttttgtttgactttctcacgactactgtttgttttgcagcatccaggtacttaacacagacatcgagcaccttagcaccttaccccgacctggtcgtccgagatagcactactcacgagctatgtatcacaatggattgaacccatctagacccggatgaagacggtagacggtcgaactcactaggcaactctgaggaggatgcatgtgctagcaccttcagcggtagttagcaagctgacggaaaatctggaggcttctgacagacggacattggccttgtcgttaggtttcccaaatgactgtaatgtataatacctcaccccaaaaacgaaacgactactgtttgttttgcaaaaacaaattaaagatgttttaacatctttaatttattaaaaaaaaaacacacgagttggagatattttaaagtaattttcttctccggcagctcgttcaatacagtgggtagcactttgcgtatcgtcttataataccctcctcccatttcttttctttcctttctatggttgtcgaatcgaagtaatccggcaattacggaaaagtgttccgtgttgaaaaaaatgtgcaaaccttactttaattaaagtaaagctgatcttctacagtattagcgcttgatggcgcttgagaaaagggcgcccgatttctgataagcgttgaaagctatgatacccacggttggagctcaaagttcttgtaagcttgatggtgctgctgggccccaggccccaactccgctctttgtaacaaagttcccgcgaactccgctttttgtaacaaaaggttccaaatgcaaaaagtttccggatcactccgctttttgcaaaaagcccttggaaccgagctattctcggtctagaaaagaaaaccagagtgcagctctattttcaggatggttcggttattagcgttggtagacctcatagcgtctcgcttgacactctcagcggtagtgatcgcaaggttcgctcatggcgcttcaccttgatcggtcatggccaggcccagcaagtgtcggaccgcgggtgtgtattggtacctcacgaactcgatgatgtttttgtatgtgaaattctgggcgccggcagtgaagcgacacgagtacgcgttcatacagcgttggatttggtctcgttggggttctccacattcttcaagtggttcaactagtgtactggtcgattcgagcaaagaggttgatcttccagcgccctaagactcgagcagtaggccccccaaccacagtccacattcgttctacagtagcaagtcgcgggggattaactcgaacactgggggaagaacaaaggcgacggatacggcgatgtgccccgcaaacgctgaggtatttattcgcaaaacgcggggtctttggcgtggaaagcgagcactttatgacattatttgctatacgagagtatcttgagctgtcgtcgcagacttatcaggcctatagatccagctttttcctaccgcggatagacctgaacacgcttttagtggcgctactcgttacgaactgctggtcggcattagctgtgaatcggtttttctctcggaatccagcacttgggcgcgtggtggcgctaaccgtcgacaccttgatctgtctagccatgagtatcggattccccgtgctgatcctggcgccttccgtcgcggcgttcgatagctcgcggcacgtgttcaaggacccggcattatcgtaccatccggtcttcatcaccacctttatccttgaaaaccaactcggacttgattgatttcgttgcgaaagttattcctcacatgtccattctatttggtctcataacaaccagcaagctactcgtccgacggtcgaaatcctccaattcagtggcttccacacctcctacactgtcccaagaatccttaacaccagtactggcgagccactggcgatggatacacgcagtcattaagatcacgttcagcctgtggggatctttggtgcttagttgccatggacacgctgcgcaccaagcccgttccagtgtcgtcgctggatgtctcacttcgactaggccgtggctttcaacttgagtgtcatgcttcagttttgttgtaaattgctacacgcgcaatattgcctcaccaaacgatgaaacttttgagagtctgaacattcccgcactcgctacgcttacgtttgctcactgcccggaactacgcatgcccccagcactccaacaattcaagaatctcatgatactggacggttccggagtgggaagagcaaaactcactttcagccacaattcacacgcgaatattcgtcctcgccgccgttcgtaccaattttccgtcagggtttccaacagctttactccaacccctaccgacctctctagtgagcatacagttctctcttacggatctggaagatatccctgccaatctatcgtcaatttggcatcccatggcttccgttggctttgaatacggcgagctgaccacgtttccggcctcgctgctatccctcccggcattgacactgtcgctgcagaataatcgattgcagaatgtgccacaacttggagacctaccgccagatttaacagtagcgcaagtgatactgggcgggaattccttgacggaactcccgaattcgctgaagtctccgtctaatttctttggaaggaaccgccacttcatcactacccgaatggacgaagacgcaggttcttcaggtcatctacatgaatggcacccatattgttcgacgtcaatccgacagtccaacgtccaatgcgacgctcgatctccgactgactaccgagtggagttcccgatttctctcatggacgagctgtacgctatcaatataggttaaacaagaaactacatttttgttgttgctgcaccctgaaataccgaaaatcttgttggactgagattgagttcgcaacggtagttggaagtagaactcaatcaaacaggtaagtcttgaggacgcatgcggctacctttgcctactgttggactcacgtcatgtgatgcccgtcttgcttcctatttcgagtacaaacggagttcatcagacgcatctgagccgacgagcagcgctttatccacgcgaggttctcattcgcctacaggcaactgcagacccaagagcaaatgcttcgtctcccttcgtctaagcaggcagctatagctccaacttcaggtgccaccgctacggatatgttcgctgcaaaacccgccagaaagtcgctttccccaagcagagatgccgtgacgctggagcttcgccctggcatgtttcgcctcgcgtgggttctcgtcgtagctgcgcacatgctctgtgggatgtacctcctcatctttgcagccacttactactacctgacggacccgatcatgggctactacgtccatctatgggcccccacaaccggaaaccagaactacggattgtacgccttggtgttcgcctgcatttacttgctccacttgagtcggatgcccaagctcgtctaccgctccatccgagagtgccaactcgtcttcaagcgcaggaaaaggctcacgatggtccacgtcaaagttacggggtcgaaacgattgatcactaggcgtgctactgggctatttagccctatcaagcggacgtggagagctctattctctcgagaaggactctttggcgtcgagaaccagcatttcctcaccgtttacgtcttccgcgagttcctcgagctgtcaagccagacgtaccaagcgtaccagtacagtcgcttcctgccgcgagtgtggctcaacactctcttggtggcgatgctgctgatcaactgctggtccacactcgcagtgcagcactttctgggctcgaagcccgctctggagcgcgttgtggcaatatcagcggacgcagcgatctccatcgccatgtgcgtcatcgtgccttgtatgctggtggctccgtacgccaacgccatggacaccatgtttatcacgaggttggtgctcgagttccagctcaccttcgcctccggtctgacggacttcgcgtccgaagtgtgaaggctaacagagtggtgaaagtggtgattggtctgtgggggacggtcattatggtgttccacctccgcgctgtcattcagtcgcacctgaccttcatcgagggctgtcgcgccttcacccgcccgtggttcactggtcgttcttcctgcgtgagcctcgttatcaactgccacgctcgaggcatcgagtcaccggacgacggattcctccatgccattgatgagaccgcgctagccacgctcacatttacgcactgtcccggtctgaacatccccccagcgatccagaggttcagcaacctcatggtcttccacatctacaactcgaccatcaccgagtggagtggagacgcgaactccatctcggccaccgcccaccctcgcctattcgtcactgcagtcgcccgaccgcacttcccattggggttcccagcgggactgttgcagccgcttccggactcgctactcagcatccagttctgcgtcacggacgtcacttcactgccggacgacctcccagctcgctggcatcccatggctgttgtagccttcgagtacggagaactcactgagatcccagcgtcgctactgtcgctgcaagtgttcactctgtcgctgaaaggcaacaggatcgagaccatcccgcaacttatggagatggctccagacttggaggtccccgagctgtcgctgactgaaaacccgctgaaggagctgcccgataagttgggagcccccacgacgttcatcgaccggttggacctgcagggaaccaacttgaccacgctgccggcctggacgcagacgcaggtgcgcaaaaccaactacatgcgcggaactccgtactgcgccacggtggcgacggagctcctgcctgccaatgtgcagtgcggaccccgatctgtattagacctgaacttggactttcccctcgggtttattgatgaaatctacgccatcgaccggaagtaataacttacagttggtctgtatccatgtactcggttcttggcgattgcaaggccaggagcgataaatattctgtgccgaactacgataagattctgcagtaagttagagctcctgctagcgaaaacattcgtgcatacaaaccttcaaatacattgctatcccaaagcgtaaaatatacgttcacgccatcaaacaaatccgttcctacccaaggagcacggttgtatactgctgggcgatatgagcacctacaacgaatgtcctctccttccctaaaaagatataacgccgaagacttggttctcactcttcatcctctaacctgcctcgttctccccaacaccgcttgctgcgccaggctcttcaaagctctcgccgtcgccatgttcatgttttgctcctgtcaccacccggtttatcggagtaagatacgaatgattttttttagagtttcacaactccactacttcaatggtattagaatatccatcatggtctcgtattatagcgcgattcgggatatgtgtatgtaatattccgaagcccttgacaacgagaagtcctctgcgagctctaccgcgaaggaaaccccgagtctgccgtactttgccgagcttttgtttttttcgcccaaccaggatactggtacagtaccgcaccacgatgccattccatcaccgtcactcgagtagtctgaaaggagtgttgctaggcttgccgtgcaattttcttggaacagatcaccagctacttgtatgttcacttttgtcagcagaaaacactcaaatgtacgcttaccgcgcggttcgtagcctacagtacaggtaattgaacgattccttttgattcttgctgctcgccaccctacagtatctcgtgcccaacgcgtatcaccgatagttttcctagaacgcgtcgctgttaacgcggttgcgctcgacgaatcccggctgactacttgctccttcgattccgcggtgggggtcgtcactaggctcgcctggctcgtcataaccctggctgccattctcgtgagagtgtccgtcgtcgctgagggtgtcgctgccgtcttcgtcctcttcgccatcttcaccttcacggtacttgagcaggctgcgctccacgaatggggacgtcgtacggtactggtctgccacccagatgcgcagtgtctcgaggaaacggccgtctccttcactgaccccgccgcccacgctgcgcaccggcgcctggttgtcatcctccagctcccactcggtcttgacctcgatatcctcgcggtcgctgcacacgcgcataagaagaggcacgaacacctttctgacgtcgcgcctgatgctcgggatctccagtgcacgcgcctgcaggtcctttgatgatttgccgttgacgatgtcggccagccagttgaggcagaagttgaatttgcgcaggttcgagcgacagatctcgaaacgcatgagctccagcagatccacctcctctgccaagcgcgagcaccgcgccagcacgagctcctgcacgcggtagaagagctcgtccgagttctccagaccgtgaccgccaagcgagtaacagttctcgcagaggtcgaagcccacgcacgtggagcacgagtagcgctctcccacaataggcgtcatcttacagaactggcacgacgtgccctcgtgtgtgtacttggcgttcttgaacgtcgcagccacgcgctgcttggcacctgccgccatggtgccaatgaacttggcagcattcaagccgccccatttgcgcttcgacgtcgtgacgtcgggcacttcggacgtctcggacgccgtgtccatatcgtctgtgtgctcgcttgctctctctagaggggaagacgcgggcacaggacccgccgggtcggcgtgcttggccttggacacgtagatggccttgctgcccgtgctgatggtacgaggcatgtggggcaccagcttgcccacgtcttcgggcgacgggccgaagaagatgtggtccttgccgaagcgcttctctccaggcacaaacccaccgagcacggagtcgcggcggcgctggatctggatccgtacgtccgtcaccagcgtgcggcgctccatggtcgagtacgagaccctcagcgccgggtgcgccttgagcagcggcagcaggaagtccttgagctcctcctgtcgctccttggacaggtgacgcagcacgatctgcgactcgttcacgggctcctcgtgcgtgtccgggtccagcgcgcccatgagcacacggctggcgccctcctggtgctcgtacggcagcttcctgatgagctcctcgagccggtccaggtccagagcctcctcgaagctcctggccgcgcggatcttgcggtcctccgtccagtcgcggatcgtctggtccgccgtggggtcctcgggcggcagcagtccgccggacgagatgggcggcggggtgccaggcggcgtgtcgggctcctcctcgctgtcgtagttctcgtcgccctcgctgatgtggctgaccttgagtctgttcgtggggccgaagcccaccatgtcgcgtccctcctgctcggcctgcgcgagtgccgcggccacgctggagcggcggcgcatctccatctgctgcacctgcgtctcgagctccacgacgcggtcctgcttgtccttgagccgggccatgccggcctcctgctcgtccttcagcgcctgctcgagcccggtgatgcgctccttgtgcgcgttcacctgctcctcctggcgctgcaggtcctcgtccttgcggtccacgtccttgagcagcagcgcgttctcggccttgagcgcggcgatctcggccgagtagcgctccttgtcctcctggcggccgcggcgctcggcctgcagcgcgacgtccgcgtcctcgttgctcttgcgctcggccgcaagggccgcagcggcctcgatctccgagtcgcgcgccttggcggcctccagctgcttggcgcgctgcttcttgttggcggcctcgagcgcgctcaccaacccgcgcagggccgcgccctcctcctccttgaacttgatctcctgctgcaggaaggcgatctgcttgtgcgacgcgtccagcttgcccgtctcgagcgccagcagctcgttctcgcggaagacgtactcgaacttcttcttccagcgcgccaggtccttcttgagggccacgtagttgccctcgtagatctgcagctccttgatcttggtggccagctcttcctgcagcgcgcgcaccatgtcggtactctccgcgcgctccgcgtagcgcgccgagttgctgctgaactgcgcggaagacgccgcgccctcctcgccgcccatggtgaaggagatgagtcaagtgtcgagtgcgcactgagttggagagtgggggagaagaatttcacagggagtttgtatggctccatgtaccattttatatggtacagttcccgggcaatcagtgctggccagggcagagacatgctgatctcaggctttgccggaaggaagccatcttcgcccgtgccagatggctacatcgggctttgccgccacgtgtgaccaagactggctcgctgggcggcaatcatggcccgttatgcaggacacggacagcactgtatgtagtagcgtacttgagtaccagccccagcattgcggccgagcgagcgtaaaggctcctgtctttttctttcgtgccgtcgcgagcgcatttggtcacctcgaccggattacatcggaatgaagccacccgcggccatcagcgcaagatccgacaccttggactggcatttgtatatacactacggacccagatcctgaaaagtaatacagtaacttcaagctgcagttgtgcacactacgttttgaagtaccgtaccaactgtaagttaactcactagcgtagatttcatcaataaacccgagagggaagtccaagttcaggtccaatacggagcgaggtccgcactgcacattggcaggcaagagctccgtcgccaccgtggcgcagtacggagttccgcgcatgtagttggtcttgcgcacctgcgtctgcgtccaggccggcagcgtggtcaagttggttccctgcaggtccaaccggtcgatgaacgtcgtgggggctcccaacttatcgggcagctccttcagcgggttttcagtcagcgacagctcggggacctccaagtctggagccatctccataagttgcgggatggtctcgatcctgttgcctttcagcgacagagtgaacacttgcagcgacagtagcgacgctgggatctcagtgagttctccgtactcgaaggctacaacagccatgggatgccagcgagctgggaggtcgtccggcagtgaagtgacgtccgtgacgcagaactggatgctgagtagcgagtccggaagcggctgcaacagtcccgctgggaaccccaatgggaagtgcggtcgggcgactgcagtgacgaataggcgagggtgggcggtggccgagatggagttcgcgtctccactccactcggtgatggtcgagttgtagatgtggaagaccatgaggttgctgaacctctggatcgctggggggatgttcagaccgggacagtgcgtaaatgtgagcgtggctagcgcggtctcatcaatggcatcgaggagaccgtcgtccggtgactcgatgtctcgagcgtggcagttgataacgaggctcacgcaggaagaacgaccagtgaaccacgggcgggtgaaggcgcgacagccctcgatgaaggtcaggtgcgactgaatgacagcgcggaggtggaacaccataatgaccgtcccccacagaccaatcaccactttcaccactctgttagccttcacacttcggacgcgaagtccgtcagaccggaggcgaaggtgagctggaactcgagcatcaacctcgtgataaacacggtgtccatggcgttggcgtacggagccaccagcatacaaggcacgatgacgcacatggcgatggagatcgctgcgtccgctgatattgccacaacgcgctccagagcgggcttcgagcccagaaagtgctgcactgcgagtatggaccagcagttgatcagcagcatggacacaagagtggttcgaagaagagagcacgtctagacagataagctcactgagataggtacaatatccacgcttctatctgagtctactcgactggaaaaatggcggtgatgatatggttgcccagtgctacgtatcccaaatggcattgcgacaacatggcagttgaagagttgtggtactgtgccttcggaacgtctactagttacatgaatatgtagcagcttaattaatgcttttcgatgcatgtacgagttttttctgctgcgatggaaggttaaactaacatacttaagtaaaagaagtacttcgaagtactcgatacgctggggagcagttgagtttggtagttaaacaaaactggagatgctttgaagacacagtatacaaagggggattctcgcagttactacatgtacacagtatacagcgaatagacgtgcaatcaaatccgaaagtcgcaaaattcatattgcaaatttctagttagcaacttcaattacgcattcaaagatggaattacggcaatcaaagttggaccagaggtccaatatctccatggctacgtaagctggcgtgctgtgctcgcgccaaaagcaagggcgcgcggtttggcgcgcactatagccgacgccgaccgaggggagctcacttcgcaattcgccttcttcttcgcagatgtccctccaaggccgcgttactcgccacaccttcctcgagtagcagcgtcctaaaatcccgtattaagcgagacttggctctggatcgccgcgcaatctacgatcgctcgcgtgagccagacagcaacggtgagatcctctccatttcggaacgccagatgcacatcctggagcgcgccgcgaccgctaacatgaacgtgatgaccccagcgctggtggccagcatggagctgcactgtcgcgacttcgtcatcaaggcggcgaacaacgaggacatggtgtacggcatgtaacagggctcgtcggaccagtagtaatagcctactgtacgaaattgattgccgtaattccatctttgaatgcgtaattgaagttgctaactagaaatttgcaatatgaattttgcgactttcggatttgattgcacgttggtgtagtataaaatataacttctgatgcgattcaaaaagtcacgttcaacatcaagtgtattcaggatccctgctgtgagatcgaccccctcgcaactcactcagtcgatcagcttataggtgtgctagacaacttgcgccttagttgtgctggatgggcggcggggggggggatcactcggttgtacggactcttggtgatcggcgtgcgcacgtagtagagctgacgctcctcgggcgagttctccttaacgtccacgctggcggtggcaggagcgaagcacatcatggcggcgacggcggcgatggcgagcactttggtgagctgcatgggttctggcggtggcgttgtgcggatggtactagggcccgcgaggcaaattggaaaatgaacgacggggacgatgtctttgcctgcgtttcacctctctggtgaggagggggcgctcttgccgccaaacagcacagaaccatgtgtttcatgtatatgtttgatggcgtgaaattggcatatgagtgttactgtacatggtatttgacggctgtatggaagctcctacgccacatgtattctcactactgcagcaggagcagaggaggactgaacgtactaaagaaaactgcgtcttgtaccaatgcgtacaactgcactggttcctcgatatcaacacgagaacaataataataaacaaaatgaagcagagcgtcagataaataagatttatattctataaataaaaatattgtttttctaaacattaaatgtttcgtcagattcgctgtagtctacacgatgacgagatgattcttttgtactgtatcaacccatattgtgcttttcagactttttggcacttcagactgtaactcgtacgacttatcgagcacgacttatctataaatcgtactcgagtacgaattgctgtaagtcgtggatggtcaatcagcactaagtagtgcgcattgtcatctcctgcatgatttagcacatccagcatggattagcatccttttggcactttccgaaagtgccattccgagccaaactggcttcaaaacacgacttgagcaagtcgcattcaaagccactatgatttaccactaagtacgatcactaactacatgtgcactaattaggagggcaaactggttgcaaagcacaatacgttcggcttcttgaaaacgcactggcgtgctgcagctgtagtctcgccacgagcgtgtctatacagctaggactcgccgtcgccatggctggcgccgaaccaagagctttaacgcgcttgctgcgagtctcaatggccggtggagctgcgcactgtctttagcacggttgtgccgttgtaggcacggatcttagggcaatttgcttttcactcagttgtgcccggcacactgtgccgggcaaaaacggagtttaggcgcctttatgggggtttaggcgggtgtactttgggctatatctcaggttctagaacgtcttttcaagtgaaaaagactgttttgaattccttgagcaaagcgcagcgttttggcaaagtttcaacttgtatttcgacgtattaagaaagatgataattttgaaaaggcggtatgtgccaccacaacttgtggggcacaaagcttgatgtattgacactgcctcctgcgcgggtgcggcgatgagggttaaactaactgtaggaacttgtagacttgttgagtcgaaggcaaaaggccgaatgaacagcgtgagcgggggcttgaccttcttgctctgccgtccaaccgtactaatgcctggtgttcagcggtgaactcggagacgatggtgtgctgtgcctcgagtccgagccctcacccaaccgcgcaaaaagttacttccaccagacctacccagcagaagtacacctttttccaagcaaactgaccgttttttcaagcaaagtggtgcgggaaggtctcgcgcaacataatactgcgacgaaaaggggcatttttcaagcaaagtgtttgtttcccaagcaaaatggtttgcccaaccatatggggctaaaacggaccagtccacgtcttgggcttggtctgtaagaatcaaaagttgctatttttcggcgcaaaaaagcttagttagaatgcccacatcacgtagatcacgatagacccctcaaatacattcacaaggctgttctaagctacgttttgacttcttcaaaatgactctaaatcctcgatgattgtgaaaccactttgcttgggaacgatttacgacagaacccacaccttgaacaaaccaaaccatgaaacgtgcaagaaattggtttgctcgtaaactacgcagatttccgaaccaaaattaccgctttcgctggtttgtggtcagatccttccagctttcaaaccacgagcgggggttcggagttatgtagcgtaacaggtttggagttactgtggcgctcattggctacaaaaggctatacaaagatatcgcacactttcgtaaaggtccgcatttgttgaaataaattctcgggctgtagaatacccaagtatgtcgttaagaattgatgtacgagccacatgagcaccttaagatgcacaagagtttggcacagattttgaagttgctcgaagtgagctacgactagcccgcataatattagacggcgtgggagactagagattatctttaaaacacgatcaactttccgggcattcagcgttgttaacactgttctaaagtagcgaattaccgctgctaagcaacaattggatactcaacagaccaagcgtatgcaaacaacgcgtctagttttttttcagatttacagaacatttcaaaattggcggagctgcactgttgttagggtccctaatccctaacttagggatctcattattaaatccatttacttcttgtggtcatcattgatgacttgatgactcatcaggttaacagtaaatcatgttgaccattcttttttttctcgcgagcagcattgcagagaacttggtgactcccgtgaactaaatttttcgtgtaaattgaagctggaaattcttgttgcacgtgccaagcgccaggggaggcagcatcataaacagctattgctagttttgatcctcagcccacgcaaaaggacgacagttgcccccatgccgctttcatgaaaccaacgcgggccatccaacaacaaaaaaactagccagttcatttcgtcgtcactggcaaaatatctactggcacacgccttaactgattgtgagtattatgcgagctcttcttgtgactcagcattgaattccgtacccctacacagcagaacgtactatgaaacaatatttacgaacaaatttcttaccaacaaacgagaattcataacgtcctcccaattcataacttcctccttccttaatgctactcgagccacctcaaagcagtacatgtgctcgtatcctaaggtttttgattcacgggtaaaaattaaactaaaatgccgcagacagttagaaactatgatgacgcttctggaagatgagtgcgagagcaatcgagttcaacgtagctctgaacagcaataagttatgctacctgccagcgtcttcaagagtgtctgcacgaattccccgctttatcacgcctgcaccgttttgtcgcggcccaccctcgggtgtttgctatacgcaggcgcgctctcttaacaaacaccgagggagctgttcaagcaccacccagcgcttcggatatctcaatcttggacgtcaccattcattacgtccgtagtcagaacggtttttgcttatcgagaagtcactaacctgtaacaaggatactttctactgatcaatgagataatgcactgtatgttaaggaaactacttatgtagatagcctatctatcccgagcttgcagtagccaaattgtgaacgcgacctacgtatcagcggaacttaagggagctttagagatggaaccacttcgtcttgaaagtgcaaacagaagcaagccgttggtgtgcgcacaaattgttcacgcagacgaacatcagcctcttttgatctttcttgagagacttcgcatcaaattcgccatttccactggtcacggctagtgctgtgatgcgatcttgcctatctgtaaacacatattcccgtccagcgctcgaacgacctaactaaatcctccattcgctccttcgtcctggattccggagctccaagttggaataaggggaccgttcgaaggtttgattgagcccgtggcatcttaaccctttcgcgatgaatgggcgcctttttcgggcaaattttgcgtgtagatcccccttgatttatcgagtaaacttgttgaatatctggatttatatactctctgacgtcgtgtctgcctgtgtatattttttttaccgcaaaagaaagtttgagggcaaatgcccatattatcatgagccggagactggctcaagctaacagtaagcttgcttgcaactactttatctttgggcgttcccgtggtcgcactgatcgaagcggtttctcaatcgcgataattgttgtcgtggccttgccgaagagcacgataacagtgaagtgattctaaccgcgatccattctgtaaaagccgcactgcctgcgaatgtgcagccgcggttcaaaccagcgcgctggttcgcaaaaacggcatgcttggtttggagttacaaaatgaaacgtgttcaaaccatgaaaccgattcaaacctggtttgccggtaattttggtttggtttgaactggccttgttctgggtgtgtacacaaacttatatatttgtttttagagtccatccttctagggtaccatggttttggtacaggtcggataggtcctatagtcggatatttcatggtatggaagatgcaagtccgtgcttgaactcgtgaggtacgggaacgcctgggtccgagactgtggggcgtcgcccatgcagtgcaatgacacgccaagacgctcggctacaatcgcctgtccgaagacgcacgggtgcgcgatgatggcgtctgcgcggaaggttttgcccggtgccagtgggtccgcctccaggcacgctggccaaagcgagaatacaagctcgcgcagatccttcatctctgcgaacgggtctcggtggcgaacattgtctaagagccaggatcttcgtcgtgccttgttctccgcttgccggtggatatactgcaggaacttggttgtagtggcctcactgccgccaagtgggtagaaggcaagacagcatttacaacgcggtcccggtggacgttgttggttgctatccgaacgcaatggccgtccgcttgaagtcgcagtccaatcgcaacgtactgctggacgctgccctccctgctccccgtgaccatcatgcaaatgttcattctcggcggcttggcgttcaaattctctgcttgttctcggtcgatctggtcttctggctgctctgcatcgttttcttgagatacacccgaaccttcgctggagatcgagtccgatgaactatcacttgctagggtgaacgacaaatgctcaacaccaagttcgcgctccttcataagcgcgcggaatcgagcttcgagcgtgcttctctcctcgggcgtcaacttgactgcaatctgccgagacagcggctgctccccttcaacctcttcatctgcactcatagacccgttgtgcacgttgcgagacttgaaaccgagagcgtccagcaccttgttgttccccgagatgagcgagcctttcttcctcttgttcttctcgcgggagctgttgtcaacacagggtcacttttcccaggtattttcaagcaaagtggttctacagaactttctacagaaccactttgcttgataatacctgggaaaagtgatatgaggtttttctcgaaaaatgctttgaaccactttggttgggaaaccaaccagtctgcttgggaaatggtgtacacatttagttttactcagcaccggtggagatgctctaaccgtgcagtactgttcttcgaagtacttgtgcacagttgtcttgtacaactctgcatgtacatacagtacatgcacaccttctacgagccctggggagagccgggctcctgggctcttgggtgaacccaaaaagtcgcgagctcgggctcctgggctcttgagttcaataggttaagtgaaaggagccctccagaactgtgagccctcgttaagggctccccctctcctgtgttaaatatctcgctgatgattggccgtcattgaagtatctccaggttctaacctgaaaaggcataggaaagagggcttctccttgaggggaaggaagggctatcggatacgctggggtggcctcggagcggctgtacacatatgagcggcgcgagatcttctagtttggcgatctttgagctcgatcttctagcgtggcgcatcgatcacgcgaagttgctcgccttaaggataggtaaaattggccaatcagatattactatgaagagcccgtcatagatttgaagctaaatttggggagcccggaccagggctccttgatctcgtacttaccatgagggagtccattttgtgcgacttttggctctcgttttagggggagcccacttttgaagtagacgggctcgggctcgtagaagctgtgcatacatgtgcagtttgttcgtcgcctagttgcgtgcacccagtcgggatcggctcaacgaactggtattcctgctgttgctgtaacagatccacacatcagtgacgtgaggacgtgtagaagttagggtgttggggaaggcataacataaacatgcaacacggtttgatctgattggttgcaattattttcaatggtgttgaccgcgacacgactgtgttggggccaacaccaacagaaaggggaggcatctaattattggatttctgaaaagccagaaatggcgcggccgctatgaacgagatcgagtcagcgcatggggcccggtaaatacgtagaacggtagcggggcggctacagacaacgacggataaatccggcaccactgaatggcatcctccatagtaaatgtgccagaattctctgtcaggaacgatagagattatacaaggcaatgacataaaatacacgtaacggagcataaagtacacacaaatttagagaaagtacttaaaaccatatggaatacaaatgtcaagtgtaaatctcgaagttgattggctatctgaattacttattgtaaaagtacaacatatgtgtgccgggttttgcgttgccgtatttatccgtcgttgtctgtagtgcaggggcttctgcacatgtgatgtggctgtttatacctttttgtcctgactgggggagcccagaggtgctgccatcacttccgaaaacatcacccgaaatactcacatagccagaatgagctgctttcccaaaaacaggaacacgtatgagccaaccaatcaggtaggggtaggagagagtcaaaggcacacaccagacaccaaacaccaagaactcaatcagccccttatagcacttcaacagttcaaagcagttttcatggggaaataacacagcataaaagtaccgccataaatcgacactatacaaactcaccgtaaagttcatgttctgcactgcaagatgacacaaatatgacagaaaacacgttaatacccagccatgccttgtctacgacagtgaggatggaaccagcggttttatccgctccggatctcttcactgagaacatcagacccacgtttcaattcttcattctccaattcgcctcgcactacacagcaccgctccaagagtctccgccccaagacagagcccatgcagctcgtcaaagtgctcgccatcgccgccgtcgccaccatgatgtgcctcgcccctgccaccgccaccgccagtgtggacgttaaggagaactcgcccgaggagcgtcagctctactacgtgcgcacgccgatcaccaagagtccgtacaaccgcgtgatcccccctccgccgcccatccagtccaactaaggcgcaagttgtccatgcacacctgtaagctgtacgacttgcagggcattgctcagggttgcaacaagccaatgcgaatatacttgatgtttaacgtgacttttttgaatcgtttgcctctacaatatgtgttacaagcgactttgtgcgccgcacagcggcgcaccagtcttacctggaaggtgttgtaacgaatgtggcatgataatgccttaagtgagagtgacctccaaactactgccatagtgccttggatgtccaataacaaccaactcagacacgttcatgataattccagtgcatatggtacatatcaggtactacatgcaatttccagcgatggcacgttgggggaatgatcttcattttcactgcacatcaggggcgtggcgtggcgggttagctgcgaggagacgaattcgaaagtgggcgtcccattgttcaacgctcaccgatctccagcggttgttctatctttactaactgcgacattgggaaactatgctttcctcgccaacttatctagctaatctagtctgttggctctgcaaccttcaattatgtggtgggagcacaaactgtaaagaaaccaagatatgttgccgtttgccaactcacgactgcagcttgccaaagcgctttagggaagaagatcaccctgtggaggcgaggaaaacacgtagcgtagacacgtattggttgttttgaatcgatcatttgggatggacgccctgaaaaggtgtactgggtggtgcacgtattctggttcctaccactatttgcagtcgttcggtacacgtatctgtgtattttgcttgatacatgcagtagttgggtgcacgtattctgatccataccactctgagcggtcatttggtgcacgcatgctgattgatatcactccatccagtaacctacgcgtaggtgttgccgcaggaggcaatgatgggtacacaccgtatttgcactgacttgggttattgctatcaacgtattaaaacggcgtattaggcgtcacgacacacgccaaactccattttatatattaagatgtattatacatgtacccacaaacttaacttcagtatgtgataagataagcgcaccgtcagtccctaagcaaaatgcgttgtggggctaccaatacaacatcaatttgtgttcagatgcacacaacgtatcagcaaacccaatccaactatgtacatagatatgtgcaccgtcaagtagcgtgtgcttagatacgcgcaccgtcagccgttttggacgacgtatctaggaatctgattggtccatgtttttagcgaatcaaaactccgtattagggaccatcacacacgcagggacaaccattttatatgtgctttgcaaccagtttgccctcctaattagtgcactagttagtgttcgtacttagtggtaaatcatagtggctttgaatgcgacttgctcaagtcgtgtttcgaagccagtttggctcggaatggcactttcggaaagtgccaaaaggatgctaatccatgctggatgtgctaaatcatgcaggagatgacaatgcgcactacttagtgctgattgaccatccacgacttacagcaattcgtactcgagtacgatttatagataagtcgtgctcgataagtcgtacgagttacagtctgaagtgccaaaaagtctgcgaagcacaatatatcaagataatagaccgtaggccattcctgttgctaggcaactgctgtaaaccacatgttgcctaaggataataatctcttgatggcgtgaattattgtgctttgcaatgattttgccgaccattttagacgctaaatatggcaaagcctgctcctaaatatgtgtgaaaaagatacacgacctgctaaaattatgcataaatccacctccgcatatatacatatatatcgacttgggagagcctgtcaacagccatgcattggcccagtacaccaccgtccatgatccccagtacatccaacctattatgcataattgccgtgtgtctatgtgcttgtggataaaacccgacagaattgtggcgcttttagcgtaattctaggcctccacccaacaatgcacctcgatttatcgtaaatctagcaggtgatcgctataaatacagcaaatctcgcctcatattgccaaaatcattgcaaatcacgatacatgcagagctaatactacagctgcatgcatggacgccagcgcttggacttgaacttcgcgtactgcgccgcttcgaaagtatttatgccacaaattgcatagggaaagtcaagatggcgtcttgggacaatgcattgtagaaacgtcgatcgcttcttccgttcggttgcaagattgacgacttcgttgacgtcgaatgaagtttcgaattagcactgccagatggacaaaaacctgggattgttgccgaggatccgccgcgctgtgctctccatttctactatttgatgtcgtaatactgggtaaaatacgccagtttggaagttttagagtacgttgaagtcccgcgttagccgtcaatcaccaatatgttcaagcatcgtcggtgtaatcacgcgatgcttaatcataatgcagcagtatcgttgtgtgtgtactgtaccaatccgagcggagctgctcaactattatgtgtattttgatcgcaagacatgatacggtacaacacggtacactacacaccatgcgacatacaagtaagaaacatccagaggctatcccaaagctggtggccagcatcaaagaggtagggtcggaaccaccgataaaatggacgtcagcaccgaaaactaggggtccgccatgtgccgagttggggaggggggggggggggcggaaacaccgaagatttggacgccaacagcgaggggttggtgtgctgagttacgcttggggaataactcggcgctgtgccgagttactagaactcggcgaagtaccgagtcctaatcttgatattcatgtgcctcccgataaaaatatcacgggctatccagtctgtatcagtctgtactttgctgcagtggtgtagatcaacgttcgtgtggaggtgcggatggcacgccgtcgtagtgtacggcaagccgacgacgggcggcaaggcggcggggaacggctaggcgacgaggtattcactgtccaaactattgtttatttgaaatgtcctgctacaaaccatcaatctgtgtgactttatttacacttgtttctttagggtggcgcgagtagaagtcgatgtcctccttggacgatgatttggacaaccccaccaaatgcagaaatccaacgagacgcgtgggtgtccactatgccaagtttcgccaaaaggaaaaacaatcttacgaactgtagagttggtcatgctgcctgtggagagaccgatcttgttgccttgcctcatgacacgccgtatattgtgacggaatgtagctcgtcacgatacaaggatagtctagccaagtgccgctgcagctacaaaatcctatgttgtgtggtgaactatgcggcggtcgtttttgtcgagggtgctcacaccatggataactcggttctcgcatctccaagggaccctattctcacagcagaaatgaaatcttacattggagccaagttagcagaggactcagccgtgcttccatacgtcctattttctcttatctgtgataaagttaaggccccacccgagcaggaccaagtcaaaaactacgtaaagcgctggcgctcgaagaatcgcgatgactctatccaaccggtcattgagttctgcaagaaagccatgtacgattcaaaccagtgcgaccggagacctgacgacttgttggttctctgtgacttagagataaaagaaggtgagcgagtacctcttatatgagaaggctctgataccgagccaatgaggcttggtataacctgctatgccttgtatcagacgtacgtgtcggttcggcaagatggagtgtgacctacactgctccacgttgatagcacatgcaacgacgagcagaagaagtacccagccaacaagctcgagttgctgagcatccagttggtgttgcaggagtacaggacgatgctgcttggacacgaggtccacgtccacactgatcatctgaacctgacctacggaacctacaacaacgtacacatgctacgctggcgactcgagatcgaataatttgggccggagctacactacgtgaagggagaaaacaatgtggtcgccgacaccctttctcggctaccccgtgctgatgactcggacgtccagcagcaggagacactggttgcagtcgctgctatggacttgactaccctcagcaatgttgacctacgggagattgctcgctgtcagaagcgagacggcacagcgacgctgaaaagcgccacgacgaatgagattagcgacgtggagctgcaagtggacagcaacaccggctgaatcatcgccccctcgagtctgcagacccctatcattgctgcttaccacgattggcttattcaccccggtgtgacggccatgttgaagacgatgcagaacgcattgacgtgggccggcatggcacgcaatgtcgagaagtacgaacgcagctgcctcatttgcacgaagaacaaacatcctacggtcaagtacggcaagctgccggagaagacttgttggtttgtagcttgtggttgagggggcaaattccgaagtaagattaaatgttgtcgtctctcaaactagtctctagtcttcccctccagctttccttcttgttctcctagtgctcgttggtgcctctcatcagacggattactcccgggttccgcttgacttgatctcagtatatatgggtctccctgaccagccattggtgtatccagagcccggctgccgccggctctcccgtcgccgtcggatcctccgagttatcggcggatgtgtccacacgttctcctcgtccatgtgcatctattggcggcgctcccgaagactcatgaacactcccactcgccgctaatgctgcaccatcgtcccgacgactctggttgcgctgatcaggtacttgagcctcttcgtccccaacgtcttggtaagcatgtccgcgagccggtcctccgtcagcacgtagttgacacgatgagtcctcgggacacattctcgcggatgaagggatgcttgatgtccacgtgcttggtcttcgcgttgtagaaggcgttgcttgcgagagcgatcgcgccctggttgtcctcccgtactcgggtagctcccacttgctcgtgacccatgtccttcagcatggcgcgggtccacagcacctcctgcgtgcacaggctcagcaccatgttctcggcctccgccgagctgagcgccaccgtgcgctggtacttcgacttgaagaccaccggcgccccgctaatcatcaccatgatgcccgacaccgagcgtcggtcgtcgagattgctgccccagtcggcgtcggtgtacgccgtcacctcgaccttcttcgcgttcccattgtaggcgatgccgatgtctcgggtacctgagcacgcgtatggcagccttccagtgctgctgcccggggttctcgaggaagcgcgacaactgggtcacgacgtacgccacatcaggtctggtgcacgttgtaatgtacagcaaacagccagtgagtgctcggtagggcttcgcctgcatttcctcacgttccttctgagtcatcggcgactgagtcttcgacaacttcatgcccgactcgcacgggttcaccaccaccttggcgtcctgcttgttgaaccgcttcaccacatcatcaatgtatcgagtctgcttgatcatgagagtcttcgccgatgagtcatggtcgatctccataccgagaatgaacttggcctcgcccaactccttcatcttaaacgcattcttgagcgccaccttgacttcctggatctcgtcgctcatcttggccgcgatgatcatgtcgtccacgaacaggcagacatacacgaacctgcccttctcgcctttgacgtatacgcactgatcgccgcagcagctccgaaatccgatgcccacgaagactcggtggatggtcttatgccaggcattcgccgcctgcttcagaccatagatcgcctattgcaaccgatacatcatgttcttcgcgttgatgattccgtagggcacctccatgtagacgcgctccaccagcccggtgttgagaaaggcggtgtccgcatccagctgctcggtgatgtacgcctcggccaccacaaccgacaacaccactcggatcgagttcatgttgaccacgggcgagtacgtctcgaagaattccacgccatacttctgcttaaaccctttcgccaccaggtgggcatttactggatgactcggccgtgctcgtcgcgtttctttgcgaacacctagcgacaaccgatcggtcgagcactcggtgtccgacggaccagcgaccatgatccgttgtccgcgtgtgctttgagctccacattcattgccttcacccactccgacgagtcgtcgctctgcatggcctgctgatacctggtgggtgcgtcattggtatcgccgatgtctgcggcgtaggccagcaccgcctcagccaataggctgtcttcgtccaccctgggtcgctttggagacggtgggcagaagtgatcatcgttgtccgagtcatcgggactatcttctttcgactccttaccgtctgcggaaccatctccaagttgtagtaccggttcttgggcacgccgggtccgttccggatccggatggaagaccatgtcatcattccataccggtctcgcgagtcgtcggtacgttgtcagctcctgcatgaatggctccggcatctccgccttatgcatttccgtgtcctcgacggtctcttccaccgattccatcggcttgtcggcggcaggtcgttgcatctcctcgggcagtgccgcatcctcgacatcttccgtcaactcaatcatcggcgagttctcgctggtcgccatgtcgtagatgccattcacctcgcgctcgtccagcttcaccgaccagggcaccttcaccttgttcgactccaagtcgtacactcggtagtcttttgagtcgtcggcgtacccaagtaacatacatttgaagctttaaggctccaacttggtgtgtcgcgacttgtcaacatgggcgtaaccaatcgacccgaagactcgaagatggtccagccgaggcttcgacttgaacgtcaactcgtacggagtcttggtcgggtgcatgctgttcgtcgaccggttgatcaggtagacagcagtgcagaccgcctctgcccaccacgcccttgtagtgtagcatgcttcgagccttctccatggtcgtgcggttcattcgctccgccactgggggctatacgggaccgtcttctgatgcataatcccattcacccggcagatctcagtcatcggcgtgttcacgaactcagtgccgttgtccgagcgcaggcatttaatgcgctgtcctcattggttctcgtacagcttcatgaacgacttgaacttggtcacgacctcgctcatcttggtcaagaagtacaccacgacgtgtcgcgagtagccgtcgacaaatgtgaggacatacctcgctccgcacatggacttcgtcttcataggacccatcacgtccgtatgaactagttccagcggtcgagtcgtcgccgacgtcgaccgcgacgggaaatgtgcgaccgtctgcttgcacttcatgcatcctccgcacagggtcttcgtctgctgttgagtcgtcgggaacccgtccgtcgcctcgcgggtctttgccatagcgtctccgttcaagtgtcccatacgagcgtgccatagctcccacttcccgtcgactcccgagtactcggtgtaatacaccatgtcctgctggcagtccagcaagtacgccttgccgaccttcttccccgaggcgatcgccttcgtcttgtcccagatgacgcacgacttccgctggaactcgacactcatgccgcgttcagccaacctcccaaccgagagtagtcgccggtcgagtccggggatgtggagcacctccaccatcttgatgcgcttgccgtcgatgcccgttaggcgcaccgaccctttccctgccacgcggatcttcttcccgtccgcgattgtcacatacatgtccgccgacgactcattgtactcgaacaagtcatcgcggtgaggcgtcatgtgagccgtcgccccactatcgatcagccaacccgctgatggattctccgccacagcgaacaccgagtcttcggcggtgtctccatttgccttttccgggcagtcctgcttcatgtggcccacttggtcacatttgaagcacttgcccttgaagccactgacctttcgtccgctgttgcgcttgcggccgaatgccttgccgcccttgccgaacttcccgttctggcccctacctccgaacgaggtagccttcaacgcgcgctccgaggtctccttcttctcctgccgctcgtactccttgagcagcttctccttcacctcgatgaaggtcacgtccttctagttctcgacgatggatgcgatcaaatcgaactccgccggcaagctgctccgcaggatgacgagttgttgggagtcatcgagcggctctacaagcgtccggaggcccacgatgagctcgtcgaacttgtccaggtgcttcgccatcgccgcaccgtcctccatcttgaactcatggaaccgacgagtcatcgtgacacgattatgcatcgtcgtccggttgtagaactattccaggcttggatagccgacgtcgccgaccgaatcttcgtgtggtgttccacagccacgccttgagcgatcagaccaagcgctttcctgtcgttgagcatccaggcctccttcatctccgccgggtccttcaccacttggacgtgcaccagcagccccttcctcgcgagcgtcatacgcatcgcgaactcccagtggaagaaattgtcgcttcccaggatgagaatgacgtgaggaagcataccatgatgggacttgaagggcgaatgagcgcaacatgggctaagcccattaggcttcagcactgcgaatcagaagcattcttcatctgtccatccaacactcaagtccttcaactgccaagcccgcactatgcgcctcactacgtctctattcgtagctgctgcctcacttcccgttgcttgcgacgcgatctcggcgaataccgagtcgaaccaaggcgagttcccaacgaagacgtatcctgatatgcttcggtcgactgacactcggatgttgagagccatggaggagcaagtgggcgcgcagggggcggtcaactttttccacgattcgacttgcaaagctgaagctggggctgcggcagaaaaagagaagtcgagaaacctaagaactaattgtagacgctgcagatcggcgaatgtttctgttgagagagagatcttccttgttacggagtacgacgtcaagataaatattcaagttgttaaatggcttatacagtcgttgctgctttcagagtcttaaactaagcgcgtaatttttggaagttctacataaaccgataggtataagaggctaagggttgtagccttgacacgaggatgatattttcattctaaacgacaataggcttgacagctaatataccagtgcgctacaaaggtcatacaattgccgctagctcctggtattacgtccctccagccttgctcagcgctgctacgacctcgacgttgagctggggccacagctatggctgaccattgaccagatgagtacacccacgctgaaggtacattagtatggcatcgaaacatttcccatcaagttagtgagggaaccgttggagagtttgattaccaactcagggtgacggctccccctgttggtcggttaaggcgaccttatcgagccggaattgcacccggaaatcagaataccattgaaagacaacttgacggtgcggacaataaagcaggtaagtatggctggtagtgataccgggctccgttgtgcaagtttcgtgggccgatcaaccatatgtacatgtttcttcaaatatgcatatccttcatcactctcaagtctttaaaataaaagtctcaaaattttctttttggaaataggaatgtgtaatatttcccgcaccgtcaagttgtctttcaatggtattttgtacgcgtagtgcagcgtaatagctcgccatcggaagtctgcagagtgcattgcaactcggagcacgtttcacaatggctggctgagccaacgatgccagacaaccaaccgggagcggactccgattaggccaaacacacccttatttatactcatttatatatgtgctatttctcctgtttatttacgtacccttgacctattctgtctaaatagcttgccttttcgaggggacaaagcattcgacgattacaatacatagaagtaattgcgtgagaactgctatatatactttttaaaattaaaattgagttgtcaagtatgttcttgtttttagccagcatgaaaaactgatgttcatacttaaatgactccttaagtacaacaacaacaacaaaacgtatactactataagcttaacaagccggactacacactggcgttttcggcaagacgcagagagtgtatgatggcgcatttccttgcaactatgataccttttaattgggttgcgcacatcgagagcggatctggtacatattcggggtatacccgtagttcggttaggtccaatgaccctccagcctgtacatattcgaaaagggtcccctggtggtccagtggtctacgggctacgaagttacgcacttgacaggcgttcgagtcctgcgaggtcccgatgatatacattcaaaactaatatctcattcaaaccaatccgaatcaaaaacaacaaccttcaactttcaatcagtagcaagccaagtatagtggccttcctggtacataataatattattatactatagtatgctacttcacctcgttctgtttgtggtggtaataacgccattcatgtggcaggacgttgtgcacttcttcagcactacccttattttaataacaataatgccacattaaaatgtacaacagtactgtaccagtagttcaaaaaaagtgcatccaacgcccgtgttttggtgattaaggtatctaggcgaatagactccagtgactacactttcttggctacttaccgttggtctccacgtactttatttcttgggccacagtataacaccattcagaacctgaaaagtcgtcgtagggctgtagcctgccttttccaaaatctgctttgtagtttcaatctcccgagaatttgtaatgggtttgagcttgggccgcttccctccctatttgttgtactcgtgcaccttgtcagccaacgccgacacaaacttctcgtaggtcctgaacccgtcggcgctctcgactttacctacgacatgaatccgagatcgtcccagaccttggaagtggaagcgccttccttgagccatttgttcacctggaactttttgaatgtcttaaacttcggttgggcctcgagctgagctcggctcaagccattcttgaatccagcgctttcatcacttgctcgtccgacttgccgaaagcaagccaggccttgatcgtcgcgttcgtggtcaaactcttccctttctctgtcagatacgttttcacgctactgtcttccgtgtcgacggtgtcggcgttgttcgtctccgcaccacggaaaaatcttccacattggacattcaggcggttggactaggcggctgaggcgaggcttccgccaatggcgaccagcgcgaatacggccagcaggaaggtgtggaccgtgaagcgcattccggtacagaactgctgcttgtgggacccaccaggcgaatcaagaaatgaggtggagaatttcactgaagatgaagctgcaaagaagtaatgacgcttaaatgggtttcgtttctcgaacggtcagcggctatcattgagtttaccaaacactaccagctctggacggaccccaccacagtaccctgtcctgacataatatctgtgaggagaaaaattgattactgcgtattcactggaggtttttcagttcaatttgagatagcaaagactgaaatgaaacgcgtgtatgccaatgaatcaaagagaaatttcaatggtgattcgctgaatatacctgctaacatgtgcgtctttgaagatattgcgaaaaaaaaagatgtaaacattgatcggtctccgtcttctagcaccaaattgttcgttccagcattaaaatagcttcaactatcttaccttttttcgaggtttgtctgtataatagcagtgatggagtgagaacggatttttttatcagcttgtcaaggattttattttcctgctagcatcaaaagctgaagtttataatctatgtgactactaaaattcaaatctacttcgggtagattttcacttgaagtaacaaatatatataccaagccgaagtatacaatggtgttttcagctagacgcggaggttgtacatataaggccacttccttgcagtcatgataccttttatttttggttttgttttggcattgaggtacatcgatgccacttaaccccttgaacgcgagcgatttccagcgtgcccatttcactaaaccctagggcggttatccgatataatttgggaagggttacaatactgaacttagtatgattttcctggtagtgcttcggctacgaagtatggacagcccaaccaggattaattcgatgcacctgatacgtggcgcacatgaagtaaaagcctactgaaatcaagtaaagtcatttaataatctcagaaatcgcatggtttcttgaaattcacgtaaaagcagaggctttatcggtggagtggcaaactagttcagtaggatattcgtttccagagcgtaagagtaaacgttaagtacgaaggtaccagctctcaaatgtttgaatgaaggaggagagggtatttgccgatagcgggcaacccggttttctagttgctatgcaagtagtttgtgcagcaatatttgatcaatctacaaaagcgcggaggatgtttggcgcgctgcgaccaagatagaataatgctaaagtctaatacacattcagcagtatgcggctaagatagcatgcgcaatggcgagatgatgatgaagcgaggcatggtaggtagcgcggcgacataccggtgatcgcaggaggggaggggggggttgtatgagtgtcggtccgttcggtggttctgcggcgaggtgagtccagctagttcggcaccccagcagcggagttttttaccgtgagcacggggggggggggggggttggctgctgcagcgaccgaaaaagctgaactgaggaccgggacaccgctcgtcggtggtggtcgtaggagcgctctgtagtccagatcactcatcattttcgccgcgttttcatacaacttttcttaggattactcggagaaattaattttgtggcaacgctggctaaatggttgtgctgacggtcgatcaatttctagtctacatcattcaatgcggaaatatattgagaatacgcgaagaaaaagcatgaatctgtaaaccgtcatgcatttttactattgatcgtaacgctcatggacgcggccaaccgccaggtgtcggcttccagtctcgtggagaagacggagggccgtatggcgcacctgcacgtggcgctcgagttcggcgaggagatcacggaggagcagctccacgcgccgtttaagaacaacccgctgcactacatcgctctgcacatctacatcacttccggggcgcgccgtgaatagcactggcgccacagatgctgcgtatcaaatgttggcaagtttctgttcatttaaccgaacaattttggtttgcttcgacgaaattgcatattcaggcgcactaccagcccaatcctctagtatatcctgtatatggaaagtcgcacggaagccatggtaaagaacaaagacatggccggcttttgacagaaaaacgcaaccttgttttcaaaaaaaagagcgcgtggataccatacctaaattaagatataagctctgcaccttttgtctcgcatctgtcacccttcaatcgtcgcgctgtcgtcgcttaggctggtgggcatcatcgccctcgctgttatcgcctcttctccgccactccgtctgtggtcgtccgcacatgaaaccatcttctactgcgatgacgacaacatagtatcattcacctgtgccgaagtgagggcttgtggcaggaaatagactcgctgttgccttggcacacaagtcaacgcaaaaaagctatggccttctttgagccgccctggccctcgctgcgctgtgatagaacgtcgtttcactgtcctttcagaccctagtttccttccacacgaagaacactttggtcacacggtggcgtctccattccacttgtttgttctcgctctgctcagaaccgtcactaccgattcggttatggtggtatgacgcttgccagtatacttcagatctgtacatacgggataacgatgttgatagcttgtatcagacacgctaagataactttgcgaccaaaacaagattgagcgtgctccaaagcacactagctattcagcgcatgacataggacaactgggaacaacaacgtttgaacatcatcatccttcatttatgtggtttattcctgacatatacgcgcaattaattgggcgatacctctgaccgcaacattgcatgacgtgggactcgctgaatgacgtgcgttgccctggtatgtagcttgctggaaacgttgctcgtagggagctcgatgcgcggatagaccgaagggttgagaaagcctgcgtcatcccggcacgtggcacagcaccagtcgaagctctagcaactatagtcgaaaaacgtatatacacgattagacacatgagtaacttgaatagcacacaatagccttgaggcgcacctttatctacagcttcccgcactgttgccgccgaacataagccagaagacctttggcttgcgtttcgcaggctgtgacagacagccttggcaccgagcgaagctctatcaactgcaatagcaacaaacgtttttgaaattagctaagtgagtggcgtagatagtagttatagcaatgaaccgcaccgtttccttcggcatcagcatcctcagctaatcaaaccgcagcccggagagctggtgcgctgaggccagcttagagctacggaagctgctgtgacgtcggtcgaagcactcgcggctgcagtagtagcatgtacatacacgattagacacaaacataacgtgaagaatacaagatgtcattgctcactgttttctctcgatccgcggtttccggtactgttgtggcagccgcttcagtgcaacggagccgtcgaagattgttactacccttctgcatcatttacgcatgtcggcaaaatgccagtagtattacaaacatcgcaatcacttacctagtcaaacgtgactagtcggaacatcggtccctcagctccgacgaagcagccggttccttcataccccctctgggtctttcgcggcgacatgagagtggagttttgctcttagatttcccccattgctgggttagatcaatccagtgcgcagtaaatctggtcgttgttcttggtcggcaagttctggaatgagattgaacgagtggcgtcggtgcctttaaagatcgtgtggtctacctcatgtactgtctcaattttgagacactttagtggtattttccagcactcgaggtggaggcaccccgaacccttttggacttaaaaattgtatggtccatacttaaaacaagataaaatccttagcatgtctaatacaagataaacattttttgtaatcgtgcataatacaggctctcgtgttcaaggggttaacttcgtggctaacgacatcgatgaccttgacggaggtcgtctctaaccgatctcccagctttattacccctagtggctacacactcagggctgccctcagccgttaaggtgtgaaggccccgaaccccgaagcgttctcatcgctgatgtgctccagccagtgccccacctcactggctgcataggcatgaagatcttcccagatcgagtcggagccgatgactcgagtgggtttgcattgcatgctacgctgatcaccgagagttgatccgcaatccgccgactttgccagtatagttgagtaaggtgtttagccttcggtggtcgccgcttctgctgctgatggatgataattttgctatccccaaccacatggagtggtctccaattgtggcgatgacaggcctttaaccccataagcagccccatgttttctgcaatgttgttcgttgtggaaggtgccgcgtatggcatgcggataacccagcagatttcgaaaccaccccacccttcgccgacccggaccactgcagctccacttcctccaggcccgggattaccacgggagccgccatcaaaaaaaggagatacttcgaacgtccaacaacgagtgctagagttggcacggccggaatcgaatgaagcgctttgcgcgccacttgtgccgctcggtcaagcattggagagtgtggaccccgtgcagtgtggaggtgcacagtggcacatccgttccgcagtcgagtgttgaagatagccagaagatagtcaaacgacacattattgagcgggtcgaaaaaagcaactcgccacctcaacactgcgtgaaaatagagggccgctccgattctccagcagctctccatcacccgcgtgagtgcgaccgtgagattgtccagcgcgaggccggctacggtcgggaaaagctgctgcgcaattgtccatacccccgcagggatcattggcagcgttaggccaaagacagcctcctccaggcccgacgtaggcaattccaatgccagccaactctgtaggaaacgcgtgcacagccgaaccgctgctggacaactccagaacacatggtagagatccactcggtcctggcgaacgcacgccgcatgaggacatccaacttgttgacgactgcgatcgtgtggcgatagcgcctggtgtttgagccgaaacaggagctgctccccccatgggttaagaccgacaatgcgccggatccgtgcccattcaagttgagagacctgtcgcagccgaaggactttgccgctcccagtgttgttggcgccgcgctcgactgtcgaagccgcgcctccgcgatgcagcagcaataatggttcgaaaatgtcgacgtggtttgatccatcgccgattacccacccataagcagaccagacgacggacacgcgggtgcggatgcacatattgaactcgaatgtcgggcccgactgtcgcggacacgaacttagtcagtcgaggatgactgctgataacgtggtcccgtgagagatccctcgatcctgacgtcagctgtacagatggtggcgaactggaagtcatcctcccgagcaccgagtgatcggctggtgttgcttcaatccgtagctccgagctgaagccccctcgataaaataggcgggggtaattcgtgaccaatagtagaacgagggcctccaccctcttgcgaattgctgatgtacgtcttctgcgggggaatagcagggtgaatgtgataagtccagctccatgacatctccagtgaatgatatcacggagccgttcaccgtacgtaagcaagcttcgaaagcaggtccggttggcgatagctcctgttcggccatcgatcagctgaagatccaccactgaagcgtagggaagccactccagacactgttggccatggacggcagtttcagccaagaggaaaagacggaccgtaaagctgccccgtcggtgactagccttgcgccgttccagtgaagatcgacacatccgaattgtcgggccaactggtacacggccgaaaccatcggtgcccgagcgggaaggtcagcagcgccacctgccgtggaaacgatggccttcccagttcaccacatagatgaacgacggcggatgccgcataccactggggctcttgcattcggggtcatgaaggtggccggagtacgggcaccaggtatcagctccttacacactaagatgtcgccgacgatatgatcgacattagatccgagggccgcccactttgagacggtaactgttgccatcgccatcagttccaaacgcagatcgggcacagctagacccccttgggtccggggcagtgctgcgaggtccgcatccaaccaagccttcgccccttgtacttctgaggtaaagacgccgtgccacacgtaattcttgatctttgtcgtcagccgatttaccgtgccagttgcaggccaggcatgctggccgatgtatagcagcttgggagtaatgaccgctgaagcgaccaagctgcgttggccgacggttgttgttttctgactggccatatacaatctggtggttaattgtcgctctgccatgctccacgtcctctcggggtccctcttgcttccaacaaagataccgagatagcggccttagtgctcaggctcctgaaactgcagaggaggtggcaggcaggcgtgccctgcgtgaccgtccggccgtagtgcaatcaccatcgttttcttgtggttaaggagaagcccagatgctgccccaaattctgtggtgaccctcaagagcgcctcgacttgagatgcagatgaaaggtagacagccgtgtcgtcagcataaccggccactttgatctccacctcaccaccttccgacgtgagcttgaccccttgtaactcgggatgcctatgataccttttcctttgattggggtagacacaaatcgaaaggatctggatacatgcagtatgtacagtatgctactttatctgattccgccgtttgcatgtaacttgatactgaagtaggaaaatattgtgtgatggtacgtcaaaggacctgttgtgcaaggtcaatccatcacaccatcctcggcaacaaatagtttagaaccgtatgaacgccatcacgatttcctcacgccatctgccggccgttttaaggctctaaatggggatttcatgcgtatgatgaactctatggtatgtatcgttggatggcgtgggaaagtatactatgatgggacttgaggggagagcaagcgcaacatgagctctcgcacttcgaatcagaagtattcttcatcttcccttccaacgcccacgcacttcaactgccacgcgtgcccgatgcgcctcactacgtctctcccggttgtcactgcctcgcttcttgtcagctgcgacgccgagtcgaaccaaagtaagttcccagcgatggtgtctccaggtaggcttcggtcgaccgatacgcggatgctgagagccatgaaggatgaagcgggcttgcaggggccgatcaactttctcaaggagaagactcgcaaaggtgaagatgctgccacggccgaaaaagagaaaattgagaaaccgaagaactaattgccggatacaaagaagattccctgttacgtagtaagtagtatgacacttcgaaatcgtttgcaaaaaacagttgttcaattgctcatcttcgcctgaccaaagtacagtcgttgcttgctctgtcagagtttttgaatcgggcacgctatttttgggagttatatatatatatatatccgataaaataagaggcttcggtggcccagacgcaaggacgatattctcagttcataacgacaatagacccagcagccaataaactacgccgctcttgctcgccttggtcatcggtctttgtcgacacaatgggcgatttccagatagtttaacctcgactacgtgacatcagaggcagcaaaccatggagcgaggagcgcggaatgatcccttccccatcacgagcgttgcgaatgccgaaaagtggttctactggaaggagagtatttcctacagccccatgaaccccgagctattgggctactactggacgttcgtcctcggtgcgacgagcgagatatgccgtcgagacgagaaggaaagcaccttgctcgccttcgtccgtgtgctctacgacaagaagatcggcgagatcacatcccgctggaacgacgagataaattcgtgcgagtggtttgacccggagcgcatcagtttcttccatgctcaagtgaagattggggacgtcttcgactactacactaccgacggcgtgctcaagttcccggagtgggtgcgattcaagtacgtggtagaggattacctggaaaacgacccacgagtgaagtatcacccgaaacgtgtgcgagctttcatcgaggagagagggctggagagcttggaggagatgcagtagatgtgtcgatatcgctactccaactcgtactgactgaagagaccaagaaattctacgacagtattttttcttggactagggtaagaatttgtcgatagcgctcacgtttcttcttgttcatccttgctctcactttgcttgtacttacctcgtagatccaaaaacttttggtagtatgcgtagtgtgggtgagagataagtgcagtaccctcgagagcatcgatgtatagcagcttcttcacataccatccaggtcgttttgccttggcccaaagctccagtttcaccgccatttcttctggggagcctccgtagtagaccttgggttcaaagaggtggttttggtggaaagcgcccgtcttgaacctccagatatcttcgtccaccttgttggcgtaccgaacgtaggttttaaacgcgtcggtggtcttaagcaattctggctcaacctcattcaggcgcagatcttcccaaaggaacttggtcgatgcttgatgctcaagcagctcgtccagctcgcgcccctccctcgcatacttaaagttcttgagaatcttgtaattcgggtgactttccagcgtttttccagccagcccggccaagcccaactcctgcttcacgtacgcttccgtcactcgcatctccacccacatctggacattaagccaccgcgattactccttcttgagcaacttaagccacgacaccaaaaccctgtattccgggtttcttgtaccgtatgtaacctcggaatctcttagggtcctctttgcggacaaaacgcctggcttggaggtgtctgctcggccaggagtagcgttaacagttcgaggagcgcgcaatgcgacgaagtaaaccgccagacagagtagggtagctccgaagcccatgtttggggagcgagcagtcgtaagtcgaacgcttcggtcgttcgcgacgggcaaaacaacattaaactggtcagcgaccgctctcactaaaacctgagagatggtgaatcgtttcgtgccgagctcacagcaggtttgaaggctagaatgttcgttactgagttgaactctacctgcttttttcaaagcacaagacttacacgacatcaccaattgactttgctcacgctctacatgtagatttcaaaaatcaaaaatcacgcaatcaccacttttggtggggaatctacctcctttgaatacaaggtagagagcaacctgaccatgcggcagtgcttgcccaacgttaaccccgacctagttagataggctgatccgtaaaacgtgctcttttgagctgttgcggtaacactacactaaaaaatgcagccaacatttttttcctacaaccccatgaacccccagctattgcgctactactggacgttcgtccgtggccatgagcgaaatataccgtcgagacgagaaggaaagcacgttgctcgccttcatccgtgtgctctacggcaagaagattggagagattacgtcccgctggaacgacgagatgaattcgtgcgagtggttcgacccggaacggatccgcttcttccatgcgtaagtgaagattggagacgtgttcgactactacaccaccaatggtggttgaagattacctggttcatcctacatagttcaagaaaacgctactagtattaccgtagaatgtcttgacatgttcagtgcaatatcgacacacctactgcatttcctccaagcggcccagtcatctcttctcgatgaacgcttgctcgcgtttggggtgctacttcactcgtagaatgtgtcggtactactcgcgtttcttcttgttcttcttcgccttacggtggttcttatgaaaagctgccgttttgtatatgttcgtcaatcttgttggcgtaattttaagtgcgttagtggtcttaaataatttcggttcaacctcattcagacgcaagcattgtcaaaaggtgcttggttgagactcggggttcaagcagcttgtccaccccatcgaatacttgaaattctggagcatacaattatagtaattcgacaatcaagcgctattcttgttagttatgacatcttcacatcaatccaacttctcctccagcaactttagttttgtttttgcaccagaatcctgtcttccgagttccttgcattaggaatcttagtcgatcgagtcaacagctaggggagtgttccatacggcaccagccatagaggtgtggtgccgaatcgcacgttgagtgagtgatctgcttgttttgctaggggcaaggaatctgaaactgaaaaacttggataatcttagtttatttattctattgaaactacaaattacgaagaaactacaagttcttcacaatataacgacattttttgattcatggtaatacatgctccagacagaggcggtagtgcaccgtacggagtacagtatcaattggttgcggtatgtacgctggctgatctcggggctacattatcgagcgtcgtacatagagtcctggaggctaagtacgcagtcggacattctttggaggcatcaaaacaccaacagactggaagtcagattgatagaaatctggtaatacatgccgagatgataccacatcagatcgggtgatagccttacagcgtcaatgccctaggtggaaattcgctgcgagtgacggagccgaacttcgacaccgaagatagaagttttaccgaatttgtactggcacatttaaaggacaagatcaaggacatgaggatcaaggcgtggcttactcttggcaagtcggacgaagaagtgatgaaagttctggggatcaagcagggcttgaccagagctcagctcaaggcccaccctaagttcaggatattccaaaggtttcaggtcaagaagtggctcaaggagggggcttccacgtccaaggtctgggacgatctcggcctcaagaatctccgagggagaatcagtgaggctgacgggtacgaaacctatgtacacctcgtgtgggcgctgggtgacaaggtgaccaagttcaacagaaatggcaccaaagtttcaactcatcgaaaatccccaggagatcgcagctacaagggacattttaaagtggtcactatatcacgacaactcagatgctgtatggtgttacgctgtagcgcggaggagctcgctggcaacaagggagcacaactcgtacgtagaaataaggaagatggaagccgatcggtagttgtccatctaaaggtgacaccctttatcatgttttaactcaggttatctcgactatcgcttaggctgagcggagaaacaccagaattagtgcgatcctctctcggcgcgcgctgtccgataaaaaggtatagaatatggttctgagggggatggctcgcccagaattgccaacatcaaatcgtccgttcgaagttgcaagtatatttagagccacacggtgaagttggaagtcgatcgagcggcattagccgaagtgcttaacccagatcgtttctttattgccttggccgcgcatcttgaacttgagtagattataaaattattgtgcattggttgggacagcatcctgtggattaccaaattcgcagttcgaagaactgtcgattggggaaggtttttggatgtcatcgaacgacattcgcgctatatccgtagcggatgtcatcgaacaacatccatactatatcaaacagcactcgatcgaatccggtctgaatgacactacaggttttgatagatgcccatttgcctccaagctcgttttccttctagattgatgtcagatgccctcgatgccgccacaggaagtgggactttcgtccaataaaatgtttggggtgggaatacaattcttgcttttttgtacgcaatatgtacatgtacgctgttcgtcgtagtaattgtgtcgctgacaattagaggcatcggtgttaatgatgcagaccttaaacacaactggtgccattaccacaccactgcatcgtattatagtgtatgcagctccagagcactcaacatagtacttactcattccattagcgttaaaactagcgatttgatcggttcattcagtcctgggtaccctcctctttcagacacagatttttcttctgcatgcatagtttctcagagagattaattgaaaatcgtgtggtcatctgaatttgtcgtgacataaattgtcggctggctagcattgtgtgaattcccacactcattggaatgagtcttgatgaattcataaaaacatcccacctaaactttaccaaaaagtacttcaagcttttaaggttatgctatccaaatggggggtatagctttattttttttgttcaacattgttttatccacagtaactctattggccggcaacgcagtgacgtcctatatggcgttgatcaaattcattaagcgggggctcaatgagttgcactagatggtatgtcttctccggaggaaaggctaaaaggtagtgcaaaaagaatgacgactgtgcatgaaatcgaaagaagcctccttccaattaaggggtgaatcgagatacgactggctcgtgtggggccatgaagaagctagccgcactcgctcaggcattttatctacgaagactttggatgattttgtgtttggcttgggtgagactacactgcgacccgcagagatccatcgagcccattttctactactactggtggtgtagaattacctactccctgatcctgttcttgtcaaaaacaacgtcaaagtacattttaccgatattagttcagatcgtcctaatgctacatgaacacggtacattcagcttaatacttgataaatggcaatcacacacttggacgaaccgaagctgacagcgtttttgctgctagatgttcaggcgacccggacgtgcggctgcgccatgttgagttttaatgctcctacgtcgtcgctgtacgccccggattcctgtgcgagaggaaatccggacggacaccgtcaaagcaaagaaaaagtacccgctgtatcctacccttacacgcgatcgagatctgctagacctcaattttgacttatcaaacttgcaacaaattgctggcgtcatcagattacccagcaagttcacttgagcagtagcccagcagcgctaaacatttgaatgcacgggattttacttttcaaattctattatcgccaccggtaagtttccgagcacaatacggcaatctaagaaataaaggattctgcctgggtatcagcgcatatttcaatggcaggacggaaggaaattacgttgatgagctagttgtttataaccgttctccgtaatataaaataactaaaatgaaactaaatccgttgattccttgtccgacaagtagcaggaggtcgaattaccacggcgggtttgtcaaaagcgctgaagcccaaattcaactaactcagcgttgacgttcaattcatcgaagtaacgacatatgaggtgacaatgcctttgaaaagaagcgatcaaacttggtacacttggttgtacagtagcagattaggcagatgctgcggctgcgaagcaggcgatggagatgccagagtacatcggttttccctgtacaagtatccgtacaatctagtttcgagctgcgaaaccccccgggtccaccacccgggtccccaatagaaattatccccgttgggcaagacagatttacaacagcgctcacatatgcagggtagctgtgagtagttgagtcgggtggtcgtgaaaatatagtactttagaagcctgaatcagaaacaagtggggggtatcactattagtttcggcacaggtttgctaccgaagctttttgaatattctcgatcgtaggcgtatatagcgtctatcgcgctaaacagacccaatgccagctccatacccaggtctgttgctggtctaggggagcggatcatgtccgttgctcagtgtgttgccacagtcaggtttgtcctgcatttaaatagcccccatggcttatgacgtggtccatagagtccgtttacccagcgccaatatgctgaacccaatagccagcgtgtgcatgcttcttgttgttcttcttcaagtttgcgtaacttttggatactacaaaaacttctggtagtatgtgtagtgtgagcgagcataccatgttccacatttcattcacagccgtttctcataagcgtatccgtagcaagttagatcttgggttcaaaaaggtggtgtctgtggaaaccgaccgttttgtacttccgatatcgtcgtagagagcgaataaacgctttatttcgccaagagtgtgttcgcataccggtcgtaggttttcaagatgtccgtgatcatgagtacttgctattcaaccttgctgagaggaaatgttgccgaaggggtgcttggttgagacttcgtgatcaagcagacgtccctccttcgcatacttcttgatttttttgtagttctgatgacttccaccagctcctctttcacgtacttgaagtcagagtaagcgaatggagtttttgcggacgtcggcagacacctcatcggacaagtgctcaagcaggaggaccaagtagccgaacccatggtggacgacgaccacctgctgatgaacgaagcgtacgtagtggtggacatcaagtactcgatgaaggacaagcgctcggtggtcgacaagaacccgatgatggacgagctcttgctgacgaactacttgctgatggacgagcactcgttggcggacaactacgcgctggtgaacaactacccgatggtggccaactacccgctgacggcaaactacccgctgacggacagctactcgctgatggacgagtactggttggtggacaagaactcagcggtggacaagcactcgtcggtggacaaggtgaacaagtacttggtggcggcggaccagtacacggtgacggactacaacttcaactacgcgtacaccaactacacacaactggatccagcggatctggattccaggtgactgctccgtcttggatttgctcggtgtcggatttgcgctctcggacgaaggccaaaagcagaacaaggacgcggtgacgaagcaacagacgcagccagtatccaagtagaagcaatcgctaataaaagttggggctacgcgagtgtctccggcggagggacgtcagttgagtccctgttgggttgatctctttgtgcgtatgtagagaggacggcgcctgttgctatacgaccatggacgagatccgaagcaagtactgcaatgcagaagatttatacgacgtgacatgttgagtttattatcgacctcgttttgcatttcaaaataatccaaacaaaaagtatcagtcgccatagttttggagctctcaaatgcattcccaggttggtttgcttgccacatttttgcgcatattccacgggtacttaccagggctcgcaaacgggtacccgaagttgacgaaaatagtactaaatagtaatatgtcgtacttataccagctatatcatgctcctacaccgtcttcttttagtcattttcattgtattgatttcgacgtagttcctacttaaatgtttaacttaagatgttttataaccgtgtcgggagatgtaatagctggtctgtccgtacaaaaccttgagccctggctggcccgggtgcacccgtggcttgtgggcgggcgggtacgggtacccggtcagcaccgtttgcgagccctgtaagtactacttactcttcttcgctagaatgccatgtacgaatgcacaccttgagagcttgactaggacccttcatacacgtttctataccacccccacgaccactgacgtgaagttgatgaatgataccgaagtataaagcaaagcaaaaatcgccccgaattactttgtcatctatgaagctcttgcaaatctgatagtccaaaatgaactcttctaagagaggcgaacattagaccttcaggtcagtttctgaataagtaggcgaagtgttggtaaaggagcaaattatcgcaagcatctttgagtgcatgcaatttgattggcgattaggcagagaatcaaacactaaaaaaattgaagtttgttttgtgggcgggaaatcaatccgtcttctcgacgatagctaggtattcgcgcaggcactgagtgtcgctatcaacgacttcgactttgatcgattcagcaaactgcaacggttcggtataggagcaggtctaagcaaactacaatacgatattgattggactctcaagcctcccccaattaataattgggttattttcttatttttccccactaatgtagccacaactcaagtgtagagttaagaacaaaggcgagaagaacaaaagtgtctaactcatgtggataatttactttggttacccatcatcgtacagcatatctacgcttaccaaagcatgccttagatcccatacacctgtaattcagattcaaacctcacaagggttcgaagtttttgtttttagtatttcgcattctatcacaattgagctcgatttctgtaagatttaacagcaaaagtaagtagtaacggcttctactattatttactaattagtgtttttaaactcctcttgcacaccaattgccgtcgaattcatggggaagtgaccataccaagcacaagttgtatagatttctgcgccagacttcctttttcttattgcacgaaattggtgacggggtatcagtaagttatttccgtaagttactgctagttattcttacggatattggaatttaccgagccctgtataggagcgaggcactcgtcggcgttgtctccgggcgacggcggactgggagacaacatcaatgcctagaaactgacgtgaaggtctactgatcggctgtcgtgcgacagctaatacgacacccctcaatgcacaagcaatttatataaaaattccagtatttatcatgttgttgctcgtattacatcttagatatttctaagtctggatatttatacagcgccatttgattgttgctagtcgcgggcgatctcgagtcagcttgttgttataatgccgagcacggccttcatatgcagaggatctactgcccttaccttagtaggtccttttattgggggttcgatctccttgcttacattgtgaattccatacacgtacatgtaataatagtactatcgaacatttttactacgcagtaaattaattaaaattgcgtcttaatgagtgttcacatggaaatacagtgctgacattgatctttacacgcgcttaaaatggttttggacttgacagtacactcgttcatacgaagctgggttaaacaacaatgcggcgcattgtgttactgctcgtcagcgatgcagtataacaagtggagccaacatcagcgaatcgtatttgtcttttagcctaggagattaaacagttttgactacataacgccgccgatctccattctttcgcgtttaggttgccttgttagcgcgttacagcggataagcacccactacctgattgatcgtaatatcgtcgaagcttttccagtgcaagatgctcacggtatatctcaactcctctgggtcaacaatctggtgaatcgtaggcggagtccctccatttcggttgtacttgcgcaccttggcacccagcgcccagacgtactccatgtaggttgtgaatcctgcagcgatctggacgtcaccatcgaagttagtcaacccgagatttccccaaatctgggaaggcgaggtgccctccttgagccacttcttgacctgaaatctttcgaagattttgaattccgggtggtccctgagctgagctctggtcaagccctgccgaatccccagcgtgttcatgacgtgctcgtctgcctgccgcgcataagccacgttttgatcatcttgtccttgaccttgcccttcaggtgccccaatacgaactgaggaaaacctctattctcggcgtcggtagtggcggcggcgccgttgctcgtctctgtcacgcacagcgatcttccaacttgggcgttggggcggttcaactccgcggccgaggcgaggccgctactaccgtaaaagctctcacttccggtaacgaggtccgaccatctcctaatatttgccattttattataaagggatcacaatgaagtactgtacacacaaaatatattttaaaagctcaactgcgaagcacgaattataatatcttctacactgacgtcttcgtcataagtagtgtcgttggaatcgccgcacctttcatctacaccgttaaaaacaattccagcatggcggaagcagttttcgatggccgacttattctgcagctcttgccagatctccttgctccaccgcattgcttgcaactgatcgaccgcgtagggctccttcttcagcttcttcacgtccttgatcttttcgtacacccagagaatctgccttctcctgtacgcccgcttgaacagtgcaatgatgccggcgtccataagttgcaagtaggtagtagtattcgggggtaggaactccacgcgaatgtttgtacacaccagatcgccggtgttatgagaacacgcgttatctagcagcagcaagatatgacgccctgccgctcgcatgtcccgatccagattgtgtagccattctcggaatatccgtcctgtcatccaggccttcgcattagcccggtatgagaagccgaggctttctgcagagcgcttctcaaagcaatgaggctgcttggcgcgacccaggaacaacggcggtagtgcgtccgtgccgtcagcgttcaccgtgagagcaagcgtaatacgggtcttcttcttgactcctcgcgcccgcttcgtacaaatagaccgagctggggccattgcgtagcaaagccccgtctcgtccatattgtagatgtcctttgcagggtagagatccgtgatttcttggagtcgttgacgaccttgagctacagcagcgggatcagcggatccagactcgccgggtcgattgcggtagcgaaggcgatgcctatgttcaaatgcagtgagccagccgtcgggtcccatgcgtcgcacagctcacgctgaatgtcgatcgctttcatccttatcagctcgcgagacagacagacgttctgggcctccaccgcttgaatccacgcccacagtcgcgactccagcgccgccgaggtcaccttcaggggcttgcggcggttgccatcgacgttgtccttgctcatgatcaacgcagccttcttgagtatgtcggacacggtcgactgggctggtgcgcgcttgagtttgtagtgtgcttttatccacgctgcgagcgctgcttgtgacatcgtggggcagtcggctgccttctgtatgaggcgtcgcttctgatgtattttcatccaggcccccatggcgttcttgtacttgtttggctcagtgaaaattctggtatgaagacctgcttcgggcttgctgctgttgctctgtggcaatgactggtgtgcagtagttcgcgccaaaactcccgccagggtttagtaaaaataaacctttccaaatagattacatcgttttattcgggatattaatttataccagtaccggaagtgggcgcgcttacagtatcttcccaattgtgcaagtggattactccagttggattacctgcagcgtaattgacgcacataaatcagtgaaaagtacaacaaatagtagcaagttcacattactgtactgtcataccgtacatgtatctgattggcatcctcgcaatctgactggcaggcatcgccaaaacccattacaaggttactaagacaagtgcaaaatcgtatacatttatctaatttgcgcaaaaaatactcttttcgataggttctagcatagcttttcgccaatatcacggtaagttgcaactgaaaacaagtaagatcacacgcctcaaattaaatggagatttcggggtccaaaaatgaagataatcgatgttactcctcgagttcttaacattttggagtgtacaactgattttaagcttccaacaaaagaatcacaatgcacactttttttcgattgatgcggttaaatcacggttcgtacgtaggttcgtaagcatcatttcggctgaaaccgtttcatgtttgtggaggcggaggaaccattagcttcgcatttttctaatgggagaagtttagaagcacccttaggagctcgtacggaggtcagaacaccgtactctacttggagggcgggatgtatagggaaaatgaccaaagaggtatggaatccaaacttaaatggcaaagatgttatttgtcgatatatatgctgaacgggctgccagacgtttaattggctcccagcgtcagattcgctccacttgtcacagaaggctgcgggaattgctccaatactatccagagaattttagtctcgatcgtagtcgtacaagccgctaaacagatccaatggtagctccatgccggggtctgttgctggtctgggggaggagatcacgttgctttgctagagcttgggcagtgtattggcacaatatggcgtgtcgtgcatgtaaatgacccccatcacttgtgtcatggtccatggaggcagtttagtgacattcgtaccctgcagatccaatcgaatgaaaaaattcgaggttgagcccaaagtctcggggagttccagcagcggattgtcattcagctcgagaccgaaaaacatttaccccgggggcattgacgccagctccggaatcgtttcgagttggtttcgcttcaacgatatcgcgaaagcttgcagtgttaccagtgacgcggacaacgatgtcaacttggaagagtcaaaggctaccactgacgttggatgagcgctccagggaagaactatcgggatatttgtgaggttcgtatcgcagaattggactgttgagagtgatatgagaagcagaaggccttgtgcagcacctaaagatacatttgagtgggccaccaccagcgttgccaaccgaggattcgaaaaaatgttatcgaaatttccccacgatacgacggtcgagttatacacgtgcaggatcatgaggctccggaattctggcagcgctgacggcatgaccaatcgaggacagtgcgcgagcgtcaatgtcgctagcactgagctgtcgattcgcttaaagatgctgtcatctgcggtctccattccatacctgccgcagtttaccaccagactcgagcacgaactttgggttcttagccacggacgcgtagctgcgcgacacccgtgggcggcattggactgggacacaactcgagcgtggagatgaagagcgaggatcacagctccccacgcacaaaatactaccctaaggactttatgagccgaaaaccagaatttctcagttgtatcgctgcgttcgatcgaacttcttgaacttcgttattactcttgcgctcgggggcgttaacaatgctactaaccttcacggatttaggatttcccggggtaattgcaatattttcgtttcgcttttgaacgacgagaccgctgatgctcacaagtgacagataaatcgcaaagtgagggattcacttggccacaaagtcggcgaaacttgacgcaaaaatcagtttggcctccagcacgaggcacaggagcacgtcgactacgagcgctaccactcgcgcgagtgcggatttatggctgataaactgatgtacagccagcgtcgatcaacagttcgtgatgagaattgccactaaaatgtcgttcatccactcacgcggtagtaatttactcgattggtgcgcttggtatgtttgagtcgacagctcgatcacctctcgcacttggaatatcgtaagaaaatgccgaccttcgactctaaacagacccgtgcgggagaacgaaacactccacgcgttcattacagaggccgtgatgcttttgaagccttgtatgaacttgacaatagcgttggggtcgcctaaaatgttttgaatattggtggggaagggtccagcagccaaacttccactcggaaaaggatttacggacggccttctagaattcacgcaactgaaggtaagttgtcgttggtggagcgatcgatatacaagttccagtactcgggtcgcgtggaggacactcgcaaaggcgtacattactgagtaaaggccatagtgctctttacctgatgagggcgaccatagctgtagtacgccatgatggagtttgtcaaatacgagtacgtcgcagcgcagccaccgaggaacgcagcacaaagcaaatgcactccgacgacgttaatccagacgagttggaaagtgactcgactgagttcaagcgctcggacggccctgtgtcgctggagccactcgacaaaaagcgtcttgagctggttatcagctgctgggtcgacttcgaaggttcgcttctccctcttctataaggttgttgactcgaattgggggggcggggtcgttgaaggcgtgaatttgcagaggcattcttctcggtcaagtggacggacggatggacccacggtgcggataggaaagtaggcgacacaacagaagacagtcactttgacagctggaaataggaagtcggccgaggcatttataggacaaccaatgggcgcctaccaaaacctagataaaaaagtttaatcgaaaaactctgatcacccgactaggcgcattactcgccggaccaaacgtctgcaaatcgaaggtgataaacacctaggccaaaaccaccattaaaagttatcggtgtccggcgacctttgccgcttgaagtatgaataccttaatctcattatgtaggtcgaaaggagacaatccgaagatggacaaatttttacaaaatatctctatttgtaaagatctcgctcggcgggaaacgtcgcgtcgaccctctccgagcaaccgagtcatttgcccccccccctcgcattctctcgcgcttcttccagcacactgtctcgcccggatacgagctttctgctgatgctccgtgcgtcgtcccagacgcgtcgtcgctccctcgagacgctccgagacttcagacgccggctgcacgacgagcacaggcgctgggagtggcagcggctcacccgaatgcgccattaaatcaccctggactgcctaaaggagcctgatcagtcttcttggatggacacctggctcaaaggaaccgacgagaatatgataaacgtgacgagcctgtctcggtaagggcggcatgcagcatttaagtgtgtagttgatttctaactgttgtttgccgttattgcttgacatgtagggcctcgttcaaccttcaactatctcgctttgcgcctcattacgagattcccatcttctactcgaaaggagggcggtctcgaaagctccaacaccaccatcaggtgttgggcttgcttctagctttctacgtaggctgtgagtatcgagggcgcctgtgtctcatgtttatcgtccccccgacgacgcttacccgcgtgctaaccgcagctgaagacgctcttacagcggcgctccgagggtttgcgcccgctcggattgtatggcctatgttcgacaggcagaaagctttagctcgtctagtgacagcaaagcaacccgtgctgcagttcacatggggctttttggatgggaaaaactacaaggtactttcgtcaagatgtgattttattgtatcattgttcgtgatcttaccatctacgtatcatacttctacttcacaggtgcagcagcctccagatagagacatccagaatgctcactacaacggttggctacatggcgtgttcgtcaccggtatgctatgcttctcagcggacgggctcatcgtgtgggctaaacataactgtccagggtcctggaacgatggcgataccagcctagagttcaggcggaagctggtgtcggcggaactaaatcttgacgatcgatatggggttgtaacagacagtgctttcccttgcagtggtgacatgatcggcaggatcatgaccccgctgaaagacggagatgcaagtagactggtgccttctgttcgggcggcggcgaaggctttatcaggggtaataacgtcgattagacagagtgctgagtggggtatggggtctatcgagaaggtctaccatcggctgctgatgccgttgccgtacgaccgcagcaaacggcagcagcgtttggacaacattttcaggcttactaactacagagtgagaaccgtcggcactagtgagatacgaaccacattcattcatggcgaggacgataggagatacacaagagtgagttgagtttgtttatgtgcataatgcaacttgaatacactacgtcttccttcctgcacacacatcttgctgtatactacttgttcttgtgaatggtcgagatcagtagcatcatttgctggtggcgctgccgcgcttcggcacggtcttgctcaaggcgggcttggaactgtcggcgacgctcggcctcttcttctcgacgctccgctcgagctgcttcctctttcttttccacggcctcagggtgttgttttgcatcctcgcggtcttgctgacgtctggcttcgacaagcgcagcttcttccctacgaacccgctctcgctcatctcgctctcatttatcctctgcgcgccgctcgtcgcgttcctctcgtcgccgcttcccctcggcttcggctctgcgatcggcgtcttcgcgaaagaagagcagtagctccttcatttccgatcccattgcagcgtgggcagcctctgcttcttccaattctttgtcaatagaatccatgcgcttcttggcttggtttctcttcgacgcagcgtatgagtcgtcaccgagctctcagacgcggggcttttggctttagctcctggatcgcgcccacccatcacctcaaagttgccccgaagaactcgtagatctcgcccacctaggcgatcactggtgttgtgcagccgtttgtgtttttcggcctctgttgcatcggaagcagcacgatccgggtttcgcgttagcgtgggcccgtcgggcgaagccaccgaagccagaggttggcagtcgcgcttcgggtggcccacagctctcggtgtcaccggcgtgggcctctccaacacctttggcgttgatgagcgtcaatggtcgttgcagaggctgcacttcgatcgctccgtgcgccattagctgtagtttggtcgtcttgcgcatcacgcacctctcgccaaggttggactcagcctgctgaaagtcagcagcgaactcgaccggaacgaggccctggtgggtcattacgaccccagcaagccgcgtatcgctgccgtgaagctcggcgtcgggaggaagaggggggtcacgaggctagttggcgtcagcctcatcggacgtaccctcctccgagcatttttcgtcgtcgaccgagttgacagaggagaccgactcgtcgtcctcctccaccacctcctcctcgtcatcctcctgctgcttgtcgatcggagcacggttgctgtctccaccgtccttggtcgagaccgagttcggtttcacgttgaaggtcttgcccacctcgtccgcgaagagggccacgttgacctcatccatgaggttctcgtcgtcctctccgttgtcgcgcccgtcgtgcgaggtgtgcgcttctctatctcatatcgattcatgagccatgaggatagctcgctgtttgagcgtcaagcggtcaccctgattgcccgcgggcttgtccttcccgtagagcttgcgaaattttctccgcagtgagtcaaagtcgcgttcccgccaggcagggtccctggagccattgtactcggccgctagcgccatccacatgttccttccagtcggaaggatttttgcggccaagtcgcaaaggagaagctcctcgttagcaccgtagttctggtatccttgctgccggcctcgctgtagatagacacgtaagatacgacgcaggttagacccaaagaggaacgcatcgaagggagacaacgagctgtacgagacccaccggcatactctccgtcgttgcttgtgtcgaagccgtcgagggggcgaatgaacccatcgcgtcctgggtcgtatgtatgatgttcagtatgtcaatcaggaagtttcgaatttcaacagatttcattacacaacatgtacacaattttcaatgcaaagctgccttaaaactgctcccgggaggtggattcaagcagagtccgagtcctggtgcaagtgttgcaggtggcgatgctggcaccccgaccacccgcagcgacagactaaccacaacttgttgccgtagaagaccgtcacctcctcgcccgggtaaatatcacgaatgctgacggcgaccaccgtcaggcgctggtccgtttgaacttcgtggaaccgggcgcttggattgcaggcgtggttcatgaagcgggggttgccgcccacgttcaaggcgtcgatgccgatgaacttgttgcccgtagcgcgggtccgtaggtgcattctgtagccgtcgtcgactgggccgttcttgcagggcggcccgaacaagtccatgcggccaaaatactgtccgatgacttctccagcaggaatcgcagcttgcgccaccaagccgcgcattccggtgcgcaggttgcgaccaattgcgagtgcgcggctttcgtgaagccagttgccgcactcggcagcgaaggtgcagttgtactccgtgcagaatctgctgcttcgagcgttgaggcaagtgcttgccttgcagcgctcctcgcacccacagccaagcccccctctcacccccacgctgacggctgggaacttccagcggcgcggattcagctgcgctgacgtgaactgcacgtcatccggccacgtctcgagctgccactcgtcgcggggtgggttcacggcaccgccttcgacaacagtaaagcccggggagctcatacgcgaggcggtgaacgacgggcgtgcagctggaagtggggagccgatgagcggcgccgtctcgggttcgtcgctgtcggaggcgaccgcctcggtttaccaagcaggaagaacctctgcacgtttgtgcaggcgcgaccggaaggggctttggggtgaccacgggggagtcgcggtttgggaacttgctgtcgcaggcaagtatgcagcatctggactcggagctgagcgcgcaggtgcgaccgggggcgatggttccgtctcagtgctctggctggaacgaggactgaaggggccatcacccgacgaggcaggcggggagagccgaaactccgcaagtggaccacctgcatcgtcacagacgcattgacgccttcgggcagcaccacccgaccggatcgcgtccttagcgacgccgaccgttgatgatcagaagcagcgggggctcctacgccggagggcaacgaggccgagtgctcggagatctctctggacagttcctcctcggcggagggcgtcgcgcgtggcgatactcgggtcgggacagtagtctttacggtcgtcacggtcttgacgaccgtcagcaccgtggtcttcttgaccttcgcgccggcgcgaggtcccgccggtggtcccgtgggcgtggcagcaacaatggccaaaggaagtgggttggctggtacatcagcagggacctcgctgcgtggctctgctgatggcggttcgcagcggtttgactcaatcgcagcggcgtcgaacgccacggcgctgagcttgtggcgcttggagacgagagcactcaaagtctcgtgagcacagcttgtcgcgtggcggcgcttgctcgggggagacgggtgcatggttgcctaggcagtgaatcaacaatcttttagctggtatgcacaaccacagcaactcatacagtgtacgtacacgtttgcagcaggcgggggcttcggtacgacgaggcgagattcgaaatgaggcgtgggctgtgcgagcgagcgcgctttcgcgccttaaagccctctaagatcgcgcgcgcaacttcaatttaaacgaaatctctaaatgagggagctgtttggacccatacattctttaagatatttttaatcgagttgccaaataaggggtgattaaaaggacgaccaaacccattttcgaattgtttgaactttatcctccaaacaattccgtttaatcgctccgtttaatgaccggtttaatcctcctacccctaatgaccaaaccgtgttatataggttttggaaggcgcccaatggacatcgttggacggctatcttcctatatcgagacattgatttgagaatagcaataaaaggtggcaaaattcatgttaacagctaaggttagaatgatcaaccccgtttggtttcggacactacaatacacacttgagacgccgacagtattgactcaaaacccgcgtcggtcgatgtcgcccatagacaaagctgccagtctcgccagtgggaacttgggggcactcgggtcgtacgaggccgcgtagatcgggctcttgtagttgactcggtagttgtggtgggtttgagggtaactcagccggttcggacggttggcgggcgtggcgttcatggacaggtgttggtgcttggccagcaacaaactcagcggcgggagctgcggtgtggtcgtgggctcagcctggggagggtattcagccatcggggtcgacggataagtgggcgacggggtgtggctgaccgacgttggggacgtgttgaagctcttgttcttgtggccttcacgcaggcgaagcagcagctccggggccagcgtcgacggcgacgggggaggagtcatcgttctgcgagcgctgaactccgcctggcgttgcagtcgctgggcctcgagcttggcggcacgacgagtttgggccttgatggtgcggtagggccagcggtacttgtggcggtggcagatgcgcttgagcgtgatgggggacaccttgagacgcttggccgcctcgtcctggcggaagtgcgagaacgcctgtagcgtctcgatggggaagtcgtacttgcgtcgactcttcttctctggctcgggggagctggaaggggtctcgtactcgagcacgggggctttggtgggggtgctgaactcgaacaacggggctttggccgggactttggcgatcggagacaacgcgcccatggtggtggaggtgatggaggatctgctacgttggaggagaattgagaagtggacagacaaggagagatcgacacttgtctcgagttcgaggagggaccaaagaccaagtccccattggtaccagcactatggagctgaagggctcaagtgttcgactcgtagtttggttagagagatccagcctcgactttgtcgaacactgcgctcttcactacgcgcggcccgaatttccggatgctgtggcacattcggtaccaatacattcgcgcagttcgaagcgatcgggcccactgctgctgcagcatacggcttctgcagatccggatgcggctcgcttctaagcaatcctcctcacagtttgccaggcctggagtcgcagagcccacgaccgagagtggacaccgtctgaatcttagctgcatgcactcactaggtccaacacacacacgaagtcatctcgacttgcaccccttcactgaccaaggggcccacgtagcatagggagcgactggagcctgaccattgtcagcgcgagacaggaagacccccatcccgttcatcgctcggtcgtcgagtcaggcgcaaattggagttggacttgctcacgctgcagctctgtctgggggagggcggacctgcccaatggaggacatgcatccgggccaagtaaaaaccgtcgacggagtcgagtcgagtcgagcgccatgccatcgagcggcgccttagtaccacgtgggaccggcggagcctcgggtcaacatccctttgggttcgaattttgttggtgtcgacgaaagatgaccaagttgaagggcttcgtgtgttaaacggcacgttggggacgaggcccaagaagagctggtacagaaggaagaagaagtatcctaagacactccacccttctcgaaatagagccgaacgtctagcgtaaaaatacccgaccgagggtaatttataggctcactcattactagggcgaaagccggacgctgacttcgtaagtgctgagggcatcagaggactcgctccacccattgggaatcggtcggaagccagaggactcagagagagaaggcaggccatgtccctcacgcgacgccatgtgggccaagcaacagccccaacggactctgaaggtcgggagcgccgcgggtcctcgatctgggaggacgaggcggacgaatactggaagaagatggagccggccaagcgctgccgcagaatcaccaactatctcggggcgctcgtggccgcgctgctgctcggcggaggggtcttctacgctcgaacagcgctcgactcggacagcatcgcggcgctcagggccaggttctacacgccgctagtcgtcactccacaacaaaacttctccaatgtcgaggtgcagccactgccagctccagtcatcgaagcagctccagctccagtgccagcgactcccagcgtccctattcaagctgaactggaccaagaagcactgcgcggccgctgccgagtgcgcggcgtgcagtctcgctggcacgaggaaacctgccggaagctctgcgtccggtacgtcgtctattgtcaaatgccttagggctttggtccgcccctactaacatttagttgactatggtctgtattccgccctccctcccttggctgactaccagcgacccgcacaacgccgcgtgcatgaacggctgctcgtacggctccctcacggtgaccaagctcgtgtgcgacaagatgcagatcgccgacttccagcgcgaggcccctgcgtcgcgctgccccgagggcgtgagctgcatggaggcctgccgcgcctacgacgacgagaggcccttcccggacctgcgcaactcgtgcgtgcgcggctgctccaacatcgtcccctccgcctgcgcgcgctcgctgcagatctacagggacctgctcgcaggccagtaagccgccgcccaaagagaacgctaacgctgcatgaaatgatacatgtatttatcacggtatacttgttcttgtcttggcctcacttcgtgttactaacgcctcgagctcctcgttgcacgccaccacctagagagccattggcccattggtcgagagcccgcggccacaggaaaatctcacgactggagaggggcaaacacccctgtcgccaagtcgcgcatgagatagtgtacccgtgcgggctgtgacttttagtcgttgcgttgtgtcgagtcgctgctccactcaccacctgcaatgtatgggctccgaagcagcgccgcgccttcgaagctcccgacgcggatggacccgatccgatccgagcgatctggtggcgacacgtgaaaattcgcggtctcatcctctcgtggctcgctccgcctccagcccatttaacacagagcggtgaacttttcacgctcgtgatccgccgcgccaaagtggcactgtaacagtaagctggccaatcagcgcgcgtctggtgtcatcaattcacttcaacttgccgggtctcttggctcccaaactactagtgagaccctcgcagagacactgtcccgccctcggggaccacaccaagcacacagcccccaagagctcaatgcccctccctgcgcacaactcattccgcaactcccccgctccgactcaagccaagtgaccagtggccatgaccccaactctgtcgccctgcgtcaagaccaaggccaaggccaagtctacgaccaccctcaagcccaaggcccccaagggcaagggcgcgtcccccgccgccgacaagaagaagcgcaagagccgacgcaagtacagattcaagtacgaacagctctcgctgtacttccacatgccgcagaagctggcggccaaggagctgggcgtggcggcgatcaccgtcaagcgcaactgcaaggagatcggcctcaagtggccctaccgaatgctcaagcagcaggccggcaacaggcccgtcatgtccgtcagggagctggccttcaagcagctgccgatcgtctgcatgctggaggcgggtgaggaggaggaggacgacgacgacgagatgagcgagtgcgacaccgacacggagagcatcgaggacgacgagcaggagcggagggactttagcgccatcctgctgtccatgcacaagacgccgctcgtgtgagaagtagagcgagggaccgaggataaatcacgtgtgacttggcgcgagagcagccgagtggtaacaaaagcactaagtagtatatgtatgaagctttcacctattgacaatgtgggcttaagggttctgtcttagttgtggattgaattacacaggctgattgaaccttggcggtaactaaacgctgtttatccggcgcattagttgagttttaactcgatctacattccacgatgtccgaaaataagggaaattcaccggcggctccggagagcgtaacctgtgaaggcacagttggaatgccggtgccgaacaagtgtcagcagcgacagcagaaagttctgcagttgtaaccacttcacgcgacttgaactataaaatacaattacttcggggcatttcatcatcgcgacttcaaaaatgttcgctatttaatttagtgcgggactagcaacttcaacgagcaacagtgcgatcaattagttaacgtacattttgagtaagtctgaagcctggtatcaggttctcatgcaaaaaatccgaactagccacgaattccacggaatcatagtgggaaactagccgtttagacatctggaaaatatcgcgatccatcctctagttccaagctcgatccacgatgcactttgctgtgcctaataacctttgttccagagttgaccacccattgagattcggtgagacccgctgtcatgtgcttcctagctattatccgcagaatccgcaattgtgttaaaccaccggatgcagccatctcccgctggatagatctcatctaacttggcgtgaagctattctgtcccccacacaaggagcaatctcgaacgtgggatctccgatcctccgcaaaagtcctacgtggccccagctacacgtctctcaaggactcggcgcgaatctcaatccaatccagttctcaactttccctgtcccagccaaaaccccacaaaatgccgcactatttcgtcatcgacgctcgcttcagcgtcggcaaggaccccgacaccccgttcatgaactacgacctgccccacaagtgcgagccttcgtacccacctacaaagtctcgacgaggcaaactcccccgtgatcggagcggctccatctcggtcgcatccctcaacaccttcccaacgtcgcccgtcaaccggttcgctcagtccatgggcccagcgagaccaacaactccgacggcctggagcagacacacgacccccgccatgtccacgcgacgcatggacttctactgcgactacagcttcgtggactcgtgggaccactcgtaccgcgccaagtcgaaccgccgaaacgtctggcaacgattcgcggagaacgtggacaagtgcgtgttccgtgtcgtgagcaagttctacaagtgaaattgttgtttagtgtgtaaatgagtctgtggtaaagtgcccactaagcccaatggtaggctgtggtgaagatgctaatatttaaatagtggatgttcaggaacttgttgcccctcgacatgcatatgttgggcgtcttaatagaatattgtagctctgtacgaaaagtatctcggggacagtagtaattgtcatgggtgaagaatttgttcgtgttgaaggattctcggcaacggcgtcgccaacagccagtttcttacgagaagttatatttttaatcaacacttcgggtcttcacgtgtatgctgctcgattatgattataagaactacgtaggtgggatgaaaatataactcggtcgtgacttggggcataaactttatcctaactaccaaaataggttcaatgcaaggtcagcagcagcttcttaggactcgttgtcacagtcaacgtcgctggggatgtcgtagtgctccgagtggccactgctgtcgtggctgctctcgtccctctccaagagctccttcatctgcgtagacgtcaccgacgaggtagttgatagcgcgtgcggcgacataactcttgttggctcactgtggaacactcgcaggcatcaatttccgccatgaacgagaggctccgacgatgtggagcctccctagcacgactgtggaacgacctccagatcgaattgaacggagcgtactcagtcgagcgactgcagcagctccgcgactatagcgagggcgtgtccacaatccactgcattctcgtgctgataacgaccacattgccttgtcttctggtcactatagtaattgagagcatcccgttgcgtccacctagcgatggaatcgagcacagttttctactatgggtgcgaacgttcgcgctcactactatcgtggttctcggattcatgtggccgtgtcgagtcgtggttccaggcttaccgtcggctattacccctgtggtcgtgcgtctgcgatcgtgggagccgccgggaccttcggaatcgcatacgctatcggcttccccctcccgttcacgctcgtgtgcgagtctggtatcggcatgctcatcatgggcttgggcatgatggccgcttggggccactttcttcttagagaccctattggacgccttgcattcactcgtcactttacgttagagacgatgcaagccagcatggtgtgggtgtatccagcgtacgcctacgtcttcaacgagctctcaggaggacgccaaatcgccgcgatggcgctgttgccagtgatcaagacgttctacaagaacgcgtttgctcgtatgctgcgtgaacgtcaagatcttcaaccttgcctcgtggtgtttagtgcggagttatatcacgtgctgtttctgtcgtggtgtatgaacggctccgtctcgaaggcgaccattgtttcgttcatgctcgttgacgtcctggaagcggttattgcgttgcatgaagttgacaacgcggtcgttcgtatcacttccagcgttacgggtgaagcgaggattattctgctgatgaagagggcgaagtccgcggtgagatattttagctctcgttccagttctacacgcgagatgaggagcgattcgctgctggacaggaccaaagcagccatgggggtcccaaactctaactcggagatctctaaagtaaaggctcgggtttcgcagccaaagtcaagtgtcggtctcagtcaacatgtgaagccaccacgcgtcgtgccttttgatgtcgaccctatcgatgaacgactgcacgaacaccttcatgtccgttctacagccagtgtaaacgtccacgggctgtctgcttgctcgagtctggtggacttggcagtggcagcgcagcaatcgatgattacttcggactctagcgctgacacggcgattttccgcgagttcgtgcaccactccgctcggttgctgtatttgaccgagttcgtgttacttattgagttcaccgaagtcatgattccctgtatgtacagtacgtcaccccccccctcccccctggcttattaaccttttactaataatgattgccaggtctttatctgctagcggcctatcacctgcccaaccgcgtgtacttaaacatcattcacgacaagagcattgaagaaatctcgtacaacatcttcgcactcttgggctactcgtccctggagatcgtgtctctgacagtgctgggagtaatcctgcagcggcgcactcgagtctccgtgctacggcaactcgcgttcgttcttgagaccaactgggcgctcgtgcaggccaatatctgcctctgggtcactctagccatgcaagcgcccctggagcactacggagtggacttctccttccaattcaagtggctcagcaccaacaattgatgctaaaaccggctgttccatactcggaaaatatgataagcaaagcttgaaggctatcatgaccccatctcaacttgtacttcctgcaacttgcagcgacgagctcacatgtcaattcagaatcagctccgacacacgcgcaagtgcgggttgaccggggcgaactatgcagctaaatggcatcgtggtagctctgatggtggtattcctcatgctctgcaacgtaatcgacgccatcaacgacaggaccgacgtcttcgagaccaccagactccgcgccctcagccggggaagatattcgagcggttttacgagtagagagagcggggagagagggttgtctgccacgttcgtctcggaagttgaaagcgtttttggtaaaaattctggcatcaccgagaaagtcgcgagcatgcacagcaaccctcaagttgctgcggctgtggagaagagtccgttggtgaaggagctggagaccgctgcggtgaatgacccgaattttgtgaatacgctgaagaaagaccccgaattgcccaagaaactgcacaaggatcccgaagtggcgaagatctcggtctcgctagagaagaagaacacgcacttctctaaggacgacattaaacagctgcgagcggcaattgccagactcaaggatccctcaatcgagggaaagctggacaagattctggacgtactagacaagctgacgacgctggttgtcaagggcgttttcgccacgctcgtcttgttgctggcgatagcggcgattgcggttgtgacccacgcaacatagcactttgactgcggtctttagctacaacaataaattcatgaacatccactatttaaatattagcatcttcaccacagcctaccattgggcttagtgggcactttaccacagactcatttacacactaaacaacaatttcacttgtagaacttgctcacgacacggaacacgcacttgtccacgttctccgcgaatcgttgccagacgcttcggcggttcgacttggcgcggtacgagtggtcccacgagtccacgaagctgtagtcgcagtagaagtccatgcgtcgcgtggacatggcgggggtcgtgtgtctgctccaggccgtcggagttattggtctcgctgggcccatggactgagcgaaccggttgacgggcgacgttgggaaggtgttgagggatgcgaccgagatggagccgctccgatcacgggggagtttgcctcgtcgagactttgtaggtgggtacgaaggctcgcacttgtggggcaggtcgtagttcatgaacggggtgtcggggtccttgccgacgctgaagcgagcgtcgatgacgaaatagtgcggcattttgtggggttttggctgggacagggaaagttgagaactggattggattgagattcgcgccgagtccttgagagacgtgtagctggggccacgtaggacttttgcggaggatcggagatcccacgttcgagattgctccttgtgtgggggacagaatagcttcacgccaagttagatgagatctatccagcgggagatggctgcatccggtggtttaacacaattgcggattctgcggataatagctaggaagcacatgacagcgggtctcaccgaatctcagtgggtggtcggtcaactctgtcactaagtttatgtaaaagtgtatcgtggaacctggaactagaggatggatcacgatatttccagatccccgaactgcctatattccactatgattctgtggagttcgggattttggcatgtagactttcaatgccaggctttatttttttaaatggatacttttgctacttgattgctctctctatcgatttagcagtattgaacttggtactagattaaaaagcgagcattgaagtcgcgatgatgaaatgtgccaaagcaatggcgttttatagttaaagtcgctatagatttttgggtatttcccctcgttttggactccctgtggaatgaagatcgggttaaagcttcgtctaacgcgctggaaaggcagcgttgatgtcccatgaccgagcaatctggaacgagagatcttggcgaagtccaacgtggtctcagctgtatgtctcaccttggacttgacttctcgaatgccgttcttctcgtatctgataccttcaaagtgccaccgggtagcctttcaacttttcaatggatactttaactacttgacactactctgtttcagttcgccgactatcaacaagaggaaaagcaacgcgaacccggcgagaatccccaccgtcacaatcccctgaacaaccagaaggccttcttccaccctgctcgctttcgctgggtcctttgcaacagccgatcggagctgcttgatgtcatttttcgtggccttgacctagttcttctccagcgccttcgccacttgcacgacttgggggttcttctcaagcttctcgaccaacttcgggtcctgtttcaactcggtgaatagctttggatcgttcaccgcggcggtctccagcttcttgaccaccggattcttctccagagccgtggcaacttccgagttcttaccttgtcgccgaggccggtgttttgccgagtacagttttgactctcgaaaggaactagaagggcaaggccctttcctcactctccgcagttagagacacgcgcttgttggtggtctcaatgatgtcggtcttctcattggcagccgagatgtcgacgcgcgttgcgaagatggcaaccatgaacaaggcgaacaggcgagtaagctgcatgttgaatgtcgggacttgtgtgttctgaaaacttggaggcggattccggaatgaaagcgtcagtcggtcttgcgggaggcggcgatgagatgggggggacgtctttccaccccttgtgaagactttcgcgtacctccgcctcacatacggtgaagtgagtggttttgcgatgcagtcagctaattatgcgaaatctgtaagctttgctcttcaattgttcgagcgctcttcgtcccctccctagttcacttgttccgcatcttctggacccatacgtctccaataccgcattcaagtttcacgtactttgtgaacactggaacgtttgcaccttgctgattgctgtttttagccggcgccatggagtggcgtggtacagtgtgtactacacactcgcagagaaacgcccgggcttcggcatcttcacggagctgcacgccaggtccacacgagcatggacatcaacgtgcgcaaccgtgagcgacctggccccagttggcacagccggcctagtgcagaaggaaacggcgggcggtcccaaggtggttatgtccatcataaccggtgtaatacccccggctcgaactaacagtaaaccagctcaaggaagaagctacagctttcccgggcccatgggtcccggggaaagacgaagttcgtacaagtatgttgtatagcatgttgctgtgctataatgtgcttcacggtactttgcacatttccgggagtcggctacctactaagagtgtccgcaccggtaaagctaaatcccaatgctaaacctcgattccctacccacaataaccgtgtgcagtggtgatttactgtagctgccgaaaccatctgaaacaatgacttggtttttgtattggtgatttggccgccgctaaatctgctgccaaatttggcattggaaatagcatccggacttcagggtcatacgaaatccaagatactttaccatgcaccttttattttaccttttattaatactagctgatgccaaattcgagctgccagacatgaagcgggtataggtttactcagatttagctttgggtttagctttaccggtggggacactctaagacggtctgttttgaatttaaatttgttgcggtttagagcatttccaccggtctgattaaactaagttaaaattgggaccacacccaattccgataaactgatacagttcgacaaaagctgacctaatttgattgccatacaaaaatcaagtgacaccgactatccgctgcctaaaatagacctttttctagcatcgactatcggcctcctgtacgaatttatcgcactttccaatttagcccaagttttagtcggcttcattctttactattatattgttcttctttctcaggttgtactctgtcgtgtgttttcatgtatattgttgtgcttactcctaataatggtctagtgcttcatactcccaatgtattcctaccgcgggcttctgacctggcggcacgtcatccgcccgacgactctggttgcgctgatcaggtacttgagcctcttcgtccccaacgtcttggtaagcatgtccgcgagccggtcctccgtcggcacgtagttgacacgatgagtcctcgggacacattctcgcggatgaagggatgcttgatgtccacgtgcttggtcctcgcgttgtagccagcgttgcttgcgagagcgatcgcgccctggttgtcctcccatacttgggtagctcccacttgctcgtgacccatgtccttcagcatggcgcgggtccacagcacctcctgcgtgcacaggctcagcaccatgttctcggcctccgccgagctgagcgccaccgtgcgctggtacttcgacttgaagaccaccggcgccccgctaatcatcaccatgatgcccgacaccgagcgtcggtcgtcgagattgctgccccagtcggcgtcggtgtacgccgtcacctcgaccttcttcgcgttcccattgtaggcgatgccgatgtctcgggtgctcttcaggtacctgagcacgcgtatggcagccttccagtgctgctgcccggggttctcgaggaagcgcgacaactgggtcacgacgtacgccacatcaggtctggtgcacgttgtaatgtacagcaaacagccagtgagtgctcggtagggcttcgcctgcatttcctcacgttccttctgagtcatcggcgactgagtcttcgacaacttcatgcccgactcgcacgggttcaccaccaccttggcgtcctgcttgttgaaccgcttcaccacatcatcaatgtatcgagtctgcttgatcatgagagtcttcgccgatgagtcatggtcgatctccataccgagaatgaactaggcctcgcccaactccttcatcttaaacgcattcttgagcgccaccttgacttcctggatctcgtcgctcatcttggccgcgatgatcatgtcgtccacgaacaggcagacatacacgaacctgcccttctcgcctttgacgtatacgtactgatcgccgcagcagctccgaaatccgatgcccacgaagactcggtggatggtcttatgccaggcattcgccgcctgcttcagaccatagatcgcctattgcaaccgatacatcatgttcttcgcgttgatgattccgtagggcacctccatgtagacgcgctccaccagcccggtgttgagaaaggcggtgtccgcatccagctgctcggtgatgtacgcctcggccaccacaaccgacaacaccactcggatcgagttcatgttgaccacgggcgagtacgtctcgaagaagtccacgccatacttctgcttaaaccctttcgccaccaggtgggccttataccggatgactcggccgtgctcgtcgcgtttctttgcgaacacctagcgacaaccgatcggtcgagcactcggtgtccgacggaccagcgaccatgatccgttgtccgcgtgtgctttgagctccacattcattgccttcacccactccgacgagtcgtcgctctgcatggcctcctgatacctggtgggtgcgtcattggtatcgccgatgtctgcggcgtaggccagcaccgcctcagccaataggctgtcttcgtccacccagggtcgctttggagacggtgggcagaagtgatcatcgttgtccgagtcatcgggactatcttctttcgactccttaccgtctgcggaaccatctccaagttgtagtaccggttcttgggcacgccgggtccgttccggatccggatggaagaccatgtcatcattccataccggtctcgcgagtcgtcggtgcgttgtcagctcctgcatgaatggctccggcatctccgccttccgtgtcctcgacggtctcttccaccgattccatcggcttgtcggcggcaggtcgttgcatctcctcgggcagtgccgcatcctcgacatctttcgtcaactcaatcatcggcgagttctcgctgagcgccatgtcgtagatgccattcacctcgcgctcgtccagcttcaccgaccaggacaccttcaccttgttcgactccaagtcgtacactcggtagcctttcgagtcgtctgcgtacccaagtaacatacatttgaagctttaaggctccaacttggtgtgtcgcgacttgtcgacatgggcgtaaccaatcgacccgaagactcgaagatggtccagccgaggcttcgacttgaacgtcaactcgtacagagtcttggtcgggtgcattctgttcgtcgaccggttgatcaggtagacagcagtgctgaccgcctctgcccaccatatcgaagccacgcccttgtagtgtagcatgcttcgagccttctccatggtcgtgcggttcatccgctccgccacgccgttctgctgggggctatacgggaccgtcttctgatgcataatcccattcacccggcagatttcagtcatcggtgtgttcacgaactcagtgccgttgtccgagcgcaggcatttaatgcgctgtcctcattggttctcgtacagcttcatgaacgacttgaacttggtcacgacctcgctcatcttggtcaagaagtacaccacgacgtgtcgcgagtagccgtcgacaaatgtgaggacatacctcgctccgcccttggacttcgtcttcataggacccatcacgttcgtatgaactagttccagcggtcgagtcgtcgccgacatcgaccgcgacgggaaatgtgcgaccgtctgcttgcacttcatgcatcctccgcacagggtcttcgtctgctgttgagtcgtcgggaacccgtccgtcgcctcgcgggtctttgccatagcgactccgttcaagtgtcccatacgagcgtgccatagctcccacttcccgtcgactcccgagtactcggtgtaatacaccatgtcctgctggcagtccagcaagtacgccttgccgaccttcttccccgaagcgatcgccttcgtcttgtcccagatgacgcacgactttcgctgaaactcgacactcatgccgcattcagccaacctcccaaccgagagtagtcgccggtcgagtccgaggatgtggagcacctccaccatcttgatgcgcttgccgtcgatgcccgttaggcgcaccgaccctttccctgccacgcggatcttcttcccgtccgcgattgtcacatacatgtccgccgacgactcgttgtactcgaacaagtcatcgcggtgaggcgtcatgtgagccgtcgccccactatcgatcagccaacccgctgatggattctccgccacagcgaacaccgagtcttcggcggtgtctccatttgccttttccgggcagtcccgctttatgtggcccacttggtcacagttgcagcacttgctcttgaagccaccgacctttcgtccgccgttgcgcttgcggccgaatgccttgccgcccttgccgaacttcccgttctggcccctacctccgaacgaggtagccttcaacgcgcgctccgtggtctccttcttctcctggcgctcgtactccttgagcagcttctccttcacctcgatgagggtcacgtcctccgagttctcgacgatgggtgcgatcaactcgtactccgccggcaagctgctcagcaggatgacgagttgtcgggagtcatcgaggggctctccaagcgtctgaaggcccacgatgagctcgtcgaacttgtccaggtgcttcgccatcgtcgcaccgtcctccatcttgaactcgtggagccgacgagtcatcgtgacccgattatgcatcgtcgtccggttgtagaactcgcgtagagtattccaggcttggatagccgacgtcgccgaccgaatcttcgtgtggtgttccaaagtcacgccttgagcgatcagaccgagcgccttcatgtcgttgagcatccaggcctgtcgggtccttcaccacttggacgtgcgccagcagccccttcctcgcgagcgtcatacgcatcgcgaacacccagtggaagtaattgtcacttcccaagatgacttcggccttcttgctggacgtcgtcatgtcggtcgtcgggagggcttgagcttgttgcggctgttaacctgttggtttgtagcttgtggttgagggggcaaattccgaagtgagattaaatgttatcgtctctcaaactactctctagtcttcccctcctgctttccttcttgttctccttgtgctcgttggtgcctctcatcagaggattactcccggtttccgcttgacttgatctcagtatatatgggtctccctgaccagtcattggtgtacccagagcccggctgccaccggctctcctgttgccgtcggatcctccgagtcatcggcggatgtgtccacacgttctcctcgtccatgtgcatctattggcggcgctcccgaagactcatgaacaaatgtcatacttaaataagtctcaacgacttcttgttcaaacacaatgctccgtgttagcaccattgttaccgctggcgcgtccataccatccacgcatttacctagcgtagttactcgtttgcctccacacagtatgtcgccaagccgaacccttctgaatgtttatacaacgaaacgctggtccagctggcggatccatgctcatcgccctcctgtccaacctagccagatccaaaaagcattagaaccaacgccaatatcacgctcgactgtgtgagcccagtgacccacctcacttgcctgccgccctgcaaatatcgaaatgaaggcaagttctgtttggcggtggtccttttataaaaagaggtgacacttcaacatggtcaaaaataattgagctttcgttgaataaggcatggtaaagatttttgggggttatggttcagcgaagtcatgtaccgtctccttaccggtagaaaacggtgttgggagcacggtactgcgtttcctgcccctaacgatagtttaagttcaaatttttcatggggattttttcttacgaacttcaaactaaggcgagccagtatagtgtcgttatctgtagagtacagtgtcctgtcttcaccgaagtctcagtgatatgcgagatgtagcacaaggggaagcttgagcatcgtacacgtacacggatgcccgctgcatggactctccgcccttgactttttatccaagccgcgtggagatcaggcacgcagttctgcatacttatctcctgggaaaaaaacaatgaggacgaggcttgttttgccggtcgttaagtccacaacgtcgaacgagttcactgctcgaaatcagagtaccgggccgagccaagcaaccgtagattattaatggggtcgtatactgatcgggtcgggggatttggtcgggctttcctgtacacaattgtagtgttgtagaacgatcaaacactgtcaagagatgcctcagagagaccgtttgcaaccgcagcgaagcggaggtctgcaatggtcggcgcgtgggccggagtaggtatgtctaagtaggagctactaactttttaccgacgccttgcccgccatgagcgaagcgaaattggcggtgcaaacgaggagctcacccaggcgaagcccgaccaaatcgaccggcccgatcagtatacgaccccataaaaagtctatccaagcagcgaccagagtagatgagatgtccagtactgagaacagcattatcatctgggccctgtttgatctcgacatacatctctttgaacgagatatctagttaaccgttttacttttgcacatttggatcctttcgggatggatgactaacttccgaattaacccgcgggttcttccttacagagatcgtttccttctcagctgcagcttgttgcgtagactgtatacatgtggtaggctgctcacttgctgacagtgaacagagttttgaatttcagcgtttaggatcaaaccatctatcaattttaagacaatagctggaaactcgcaacaagtggtacaacttgcaaacaaattaacccaattctgcttagctcgagcacttctgcgttctacgagctcggaattcatggttcgccaacatgtagacctgaggcggactttagtggcacacggttgcatctgaagcagttcaatcgatcaaccgcaagaaaatcatggcaaactaaaacaaaaaaaaggtaaacagcacagtaaaacgtgaaagaaaagaatagttcttactagttttaccactcggtgcagtctgataatacgctaaggcacgtcacacagaacttctcactctccctcaaacatcgatcggggccttgcgaaacgtcagcaagatagcactgtagctcttctgcagctgctcggtgtcctctacactctccgtgtcggtgtcgtcctcgctcagctcctctttcacctcctcaacttcctcctccatgcagtcgagcggcagctgcttgaaggcttggcccttggcggacagcacgggtctgttgccggccttgtacttgttggctcggtagggccacttgaagccgtagcgcttgcagttgcgcttgaccgtgatgaccgacaccttcagacacttggccgcctccttctgggacatgtggaagtactgcgagaggaactcgtacgtgaggtcgaacttgcgtcggctcttgcgctgcttcttgtcgttggaggtggcactggggggcacgcgcttgtgcgtggcattggggcagaagacggcggtcattgttgcgggtttagggacttgggtggaagtgagcaagttggggagtgattgagtgtgctatgcatgagcttgttgctaggagtctcactactactcttatcgcaagtttgaggggcagccaaggcaagagactcctgacgggagttgatggtgccatcacggggtcaagtcgaggctgatataacggagccactttagcgcgtcgggatcacccggctccacttgcgaaagtttactcgcctgtgttaatcggcaggaggcggagtgagtgggacccgctgggcacgccaggctcaggagaccagcgggtcttcggacggcaattttgaacttacgtctcttctcagccagattgggtccatccactttcggagcccacccatttgaggtggtaacgcggcaacgtgggaccgtagctcgcttgatgcaacgtgactgcgatacgggatctcatgggtacacttgctcgccgcgaatcggcgacagtgtggggatggtaatgttaatctgtttcttttacgaataaacaacgatgaattgtttaatgacggaagcaataagctgcacacacgttcttgaaaattctaacgtagcacgtgaaccagtatcatacgcatcatatccctccttcaaacttccgattcgctctctgccttacgaaacattattcagtcaggttttcgggcatgggaatttgcagtctggccaggcattggctagttgtgggttaacgtttataggatagtgcggctaatttatcctaggataacgtcgaaatgaggtgaccgtataaaatgaaattaggattggaatactaactttggtcaggatatggctaaacttttcttctcgttagaggttaagtttggcatataatacatatcttaacgaagaattcttcattaacatcgcaatgttccgtcgtaattatcctttatgagcagtttggtactgtaggaattgaggccaagctagtgactatacttatcctggtggttctcttgagtttggatactctccgcaaaaagccttctcacatcaggatatttcagctcaacattgctttgcacctcatctctcaacgccttgtaggaatgaatccacaaacagtactgcagcccagcctgtaccaactactaacagaaaaaagaccgctgcggaaatagcagtaatcatggtcgcccctactacgccgtcgataacctccagtgtgctgagtttagcgggatcgttgcccgcagcggatcgaagcttgttaatgccctccttggtgaccttgacgttgttctgctccaacacagcagataacttcgcaacttgagggtccctggccaactttttcattgattccgggttgctcagcgccttgacaagagtcggattgtccttcacggctgtctccagctttttcacaatgggcatcttctccaacgttttgactatttcggaactctggcgtgtactcccgaccttgttgctgagaccagagttcttcttaaaaattgctttgaatctcgtggcaattgaagtcatgacccctctctcctcgagctccgaattcgccaactccccagccttgaagtcgattttgtccgtgagtacgcgatggctgctcgtgtgggagacactggactcaccctcggtcgccgcaacaggattaacattggcagcaagcacaaccagcagcagtagaattaggcgagtcaggtgcatgcttctcccgtatcgacttctccgctttggtgtgttttccgcaatggggatgtggattcaattccgagatggactcaggcggactcgcaagtaagcgacatgtatgccgtcccacgccatcggacgtaatggtccattactaatggtcactgactcgaagtcaagcaatttccataatccagtacatatgtactggattatctaaaatctctggcaaattagaagtactgtaaacagttcacattaagttcgctcaagcgaacttaccacactggtggtaacatgcatcctcaggaaccactgccaagcgtggccacagaaaaagatttacagaggtgccagtcccaaaggccttcaggattggctaccggaaggcatcgctttcagagtacgtgcttttcgttgagttagcgccgagacagaagggttgtaaggctaacataagcgaatctaaagtccattataagggttatgattgacgccgttagagttattcatagcattaataactaactccgtgcagtaccgcaagcgaacgacttacaaaaatagctaagtgtcgtttttgcttctttatattatgatcgtttacctgactgactggaggtgctgtgcttcgagcaccaggcttctcaagcacacaaacatcgggtgcaggtcaagtgggatccgttctcggctgaacgactctacgtcgactaaaaacagctttagttaggacaagcccaaacttcacaggaacactcgacataaaaaaactagctgcaagtacaaaaacaatcggctacaatgtgtcgaatccgatatttatacgaacgtggaacatatcgagcctttatggtttgtggaaccactcgtagagcgtagctatgtgatagtgaggacaagtgtatcctatttgttccaggtttttggtaagcttaaatcatttaatgttgaccgatttgctctaggttcatggcctctgtaaagttggcgttgcgaaagttttacatatcgtaatgtgtaaaactgctgctctgtggtattgctttgccaggcttacaaaacacgatcgataatactgcataactagacccctctgttatgtatgtcactagaaggtgaaatcgcggcgaattttaccacttgcatccgccagcaccattcatgaacacacctattactacaatatttaccgttcataggacaatccatacagcaattattgccctctaatgtattgttctttttgttgaaaggttcaggtggcaactacagtatacccgattcattccgtacttagccatctactgtttttgagctcctttgagcaccctcgaacttttaagtgttcatatgtactggattatggaaattgctcctcgaagtcacaacggaactcctccgaatctgtagccgtggtcagcagagtatgtatgatagcgtcagcggtttgggacccaggtctacttacatgtacgcatgtattgtggctttcatccgttttggcaaatcgggtggtccaagatccgatatatcgggcccgatttgctggagggctccgatttagcaggaggggctgggaagcaaactatatctggcccgatttggtctgggggctgaaaaacacacagccttaggggtaggtccaccatattagaaggctgtagtgagcggttgcgaggagcgaagccgtagcaaacccgcgcggggtgcccgcgaagcagggccgcgcggtatttgcggaggcgggcccagcaacgagcattccagcgagcggacccattgccgcaactcggagttagtttttctactgcgggggtctgggggatgcacccccagaatgcttttatcagaaggtccctgatttgctgtgtgtatttcacgcgttctcgcttggaatgcctcccctctgagccatatgctactaactcaggccagatatagctaaattggactaaccgatcatgtaggagctccattttatataaatcggactccgagatagcacgtcaaatcgggcggcaaaatatttgaaaaccacaatagttgttaaagttgtatatgatctaacctcagttgccactggtattgttgcattgctttatccgatactacaggacgaactgagatgggcaaaggtactgatgtaaaaatccaggatacctttgcttggctaaaagtactaagctgtgcagtttgaaaattggcgcccttttgattgtctgtgcgatcttctctgtatttacgatttcactttcacatttgcacactacccgctaagccctctaggagtagtacaaagtagagctacttaccgcactgatgtggtgcgaacacgcttggtcgaaggtcagcgctgaaacaactcagtactcgggtttgattaactaagcaagcgtcaaatcccgtctaagataaactaattcagtacagccttttctctggtaacactgagatcactttataaatctggagtccttatatatatatcaggcgttcggtattcaggcagagttctgtaaaagcaaattgccctcagatccgtgcctacaacggcacaaccgtgctaaagacagtgcgcagcaccggccattgagactcgcagcgagcgcgttaaagctcttggttcggcgccttggccctactactggctggtcgacatttactcaaccttttactcaaagcctcctccgttggcaaacttgtgcaaaaatttgatctgcgtaaaaaatggagcaatttgctcagcactactcaaaccggtggagctgcacaaaactaaaactataattaaatattgacagaaaaggggtaaaatttagttttactcacgaccggtggagatgctctaaggatctgtaggcgtaataggtagtctggatattgtcgaacggacatgatattcacgttaataaatcgttcataatgcattttcaaccaatttttaatccatacttaatactgggataggaagcaacgttagtgctgctatcgcagaccaaacaggattatatccgtggtacgtcggtgacccctcttgacctaactggtacattgtcctgaaaccggcgtgaccccggtgccgcactgggccctccaaaaggtttatatgcgtgggcaagctgaactggtagaaaacccattacaccggtacggccgcggtgccgcactggccctctatatgcgtgggcagattgaaccggtatgagtcagtagcatacatcaaatagtaggagtgaagtaaagtgaataattgaagcggacgaactgctgcataagcatacaaaggtaaatattttcattttctacaagctacaaacagatctcgagcaaggttcgttttatcactgtgtataagcactatctacagttttgagatggattaccgggcagacgctgcggctgcgaagcaggcgcaggagatgcccgtggttcgtaaaaaaaaactcataataatagaaagcgattataccaaaaacctcctatcccagccttcgtggagccctagttaagttggcatgaaggagcaaaagctagaactctgttttccccacaaatcttcaacgcgagacttccctacgtatatggatgggtacttatttaaccatgcactatgaaaaaaacgtacagaatctgaaacttcgtggttgattaccgtatatgagatctcctacttcagacccctgattattgaagttgtagcgtcgtacattgtttttgttcatttttagcccctttcgtgcaaaatatggccatattctttttctacggtattaattaggagatctctctgaagtaggagatctcatatacggtacactgcctacggtaattagtctgtgtgcggaaatagtctatgttcgaaaatagtattggtcagactatttattgtactggtcaaattgtagaattcataattagtctgaccacttcaacttcaaaaaaatttgtcatgcgggtaagggtgcaaggctctaatcaccacgactgacccattacacctttttctcctttgcaagttttgttgttgtttgtggttcaaaatccagggaaaaagtttttcctccagcttgctgcatacgcggtgaaagccgtcaacctttaaaaggacaaaaatggcatgtcctatgcgcgcaaggcgatgattcgatgtggactttcacttggaatcgatggtacctggtcggttggccagctctacccgcatcttcaagatattatcgcgaaacaccgcgagcacttcgaaggtaagtcggtcgatgaaaactccgagtaagactttcgtgtgtgtgttgcttcataagtagtcttagcaaaaatatagtctaagtcagactatttattgtctaagagcaatgaaccattcaatcaaaaatagtctaggtcagactaattaccgtaggctatcgcatcaaatcattgactcaatttgcattcaccagcccatgataccaagtcaacgatttcttccgcgatagcacgaggtccttctccaactccgcgaagtgccgacaacaaggtgtggtcctcattgaggaccacaccttggaatgaggactcctcattcctcattctcgaattcgcgttccaaaaccacaagagaagaaaaagcgccgccagaaccatgcagctcgttaaaggactcgccatcgtcgccattgccgtcatgatgtgctttgctcccacgaccgccacggccagcgttgacgtcaaggagaactcgccagagaagcgcaagctctactacgtgcgcacgccgatcaccaagagtccatacaaccgctacattcctcctcccccgacccccaagccctaaggcactttgaccagcggaacttgtaagctcgtcgactgaaagcaagggaagtgatatcgcacagaaaatcgttgggggtagcagtaatccattgtgtataaacttgatgttgagcgtgcctctttgagctgcaaataccagttgctccaaacaccactacgtcgaagtaccagttttgttttgctaaaaatgtttgttagtgcgtacctagaagttagtttggcagtcatgatcgtggaaataaatggatttctttgttcatctaaagctcactcctgcataaaggcaaagactggtcggtacatgaactcacgtttccttactaggcggctcttcttgaaatgttcttgtatcgctcgcaatgaatgcgtgtgacgtaggcttcgtctgtgacgtctattttcgctacgtaggatacggcgcgtacacgtagtgagcaagcgtatgtgcttgttgtacggtggaatttttcaaacatgtttgaaaaatggggatgtgcattaaatgtacacccccgttggctcctagcttgttttggcagataaaccacgcggtggaactcttccttgtactttaacatatccactgtaagaccgcacaagttactttattaatttcattatttgtccttagtagcaaaaagaaacagtgacgtatgaacaagaacttcaaaacattatggtgtacttcaaagtactccaagtacaaaaaatttcagtgatccacgatggcgaacgctggcggctacaaggagagcgacaatgcatactgtagctgaatatatcccacgagatccgcgagctcttccatcgtgcgcttcaaggtgcacgagatcgagctcgaggcgcgactcaagtgcatcatcctcgagtatatccctgaagtgaggtgtgtggacacctctacctactatccgttctaggcgattggctacgacgcgctaaacagtggtgatgttggccagatagggccctcacgctgaagtatggcaccgaaacatttctgatcaagttagggaacgaactgcgcgagcgtggcatcatctagtcggccgaaggttctctgtgaaggcgaccatatccagtcggagtggcaacagggagagcagaacgccattgagagacacgtcaacaaacaagtgtaagtataaatgcaacaactgcgagaatgaaagcgtgccgctagtgatattaggcgctgctgtgttcagtgcaagtatcctggggcgattaaccatggcgtgcaaacaaaacacaacatcatatttccttcttagctccacattcatttttattaaagcctcaactttcagagcttcttcgggccggaggcctgaggtgttgtaatattcgggtgtcgaaaaaattagcggtatgatttcgaggacggcagcaacattacatcaagttcgcggtcatatttttttaaagaaaaatctgtaaaagaaaagcaataacacaatcaaggtggggaaattgggatggacctacgtagtagttggccagaagtattatgccggtttagcgtcttcaatcaaggtctcttgttcatttccctagcatgttacgtagtgacctgaactagttgccatttgcaacgaccgcgacaagccccaagattaaagccacaaacagaatataggcaatggtatccagcacgagccatctcccaacctgccgagccacctcaataatctcaagtttgctgagtctggtggcgtcgtcgcccacaacatttcgaagctggttgatgtccttctgggtgaccttgaatttgttctgctccagcatcgtcgacactcgtgcgatttcaggattgttctccaatctctcgatggctctaggatccttgctcagcttctcgacgaagttcgggttcctctccacgacgttgtccagcttgttcacgatgggcattctctccacagccgtgaacacggccgaatccttgcccgcgccactgaacttggtgccgagaccagggattttcccgaagagacctttaagtctcgcaacagctgagggcatgaacactttctcctccttctctcctttgatcgatggtagctcttcattttcgggggtgaccttgcttgtgagaatgcggtggttgcgtgtgttgggtagatccttggtggcaacagcggcattggtgttgacgacaaaagccgtcaggagcaggagaagcaggtggtttgtcggcatgctttacgtgtgtactccgacgtgttttccgctctgggaagtgctggctccgagccgaattcgaaatggactcaccaacccgtcgagtaccgacggcgaatcgagtcgaaacgagatggtgacagtgtgcatccccgtcaaccactgctacaagacatgggataaaagaactgcggtgcgatctggccctccgtacacgtcaacagcgggtctcaggtacggataggggtttcgtatcctaggagttgtaagttaatgtgccagtcgtggagcatttgatcgtagaattagcggctcaaacttcttctacggcgcggatgagagcagtttgtttacagtataatgtttctgcatgtacaagtcaatgctgtggatgagtgacaacgtgcttgactttatttgagctcatttcgctcatcgtacagtatggagttggtatttttgcgtacggtattttcgtgcatgtacttgtgctgtgtaccgggaacgattctcgctgaaccaatcatcgctcataaactttcgtaacggaaagtgtgaataacatcgctttttcataacgcaaaagtgtgtagactacacagtacttacatgtacaacgacacgaagcattactcgtggcataacgcaattcgggatgactgtaatccccataaacacttgattgaacagtgattgattctcgattgtgttcgtaagagagcagtcggaagttccgactcggaacgcccgcctaacactgggatgaaccaatgttggtggagatcagaaactacagtattataccattgcaaccatcaagcagcttttgatttaaaaattgagaatccaacaacagcttgtcttcttctctttatacgccgatacgttccatctcgggaatccgagaaacactgcgacagaagagcacctgggccgccacttcgatatccagacgagctttcttctcccgcatcaattggccgtagttagtgaaggcctcttggaacggtgtggacacggcactaatacagagatacttcttggcaaggcgggccagcgatgggaacaaccgctggtaccgactccaccactccagcgggtcgtgctcagactcgtccgtggcgggcaacgatggtgaatccagatactgctgcacctgcgtcttgagcttgtccagctcggtagctggttcgtccagcgggaagaactcgtgtagaagcgctgctgtcttcttgttggcgagagaggcacttcctgctggggctgaggagtctttgccgttctgatcctgcttcttgtgctcctcggtctggtcttcttccgttgcaggaacgtgctgcgcttggccatcatcatcaacactgtcgtccttgtcattcaccccaagcagcaggtagagcgattcaacgagtccctccttctccgacggagggagaaacggcagcgacttgaaccgcggatccagtaaacacgacaagtatggggacgacggggcttggcctgacgagcagaggtccatattgaggttgttgacgattgtatgcctcaccgtcgcgaccagcgggtctgtcacccacgtcccggcatcagctagatgcttcttcagcgagtgcagcagcggatacacgatcgacaagcccggataagccagcggagacacgtgaaccaatccctcaatagggtccagtagccgcgcgagttgctttagcgatgcccactcctcagatgacaactcgcagcacacaaaacgcaactgcattggtctgcgggctgggttcgtgtcactttccagtccagtcttgtaccgcagcagcatgggctccagctgcacaattcgacacatcatttgggtcgtcgagttccagcggtcatcgaagtcgcagattacaggcaacgcctcgccactgttgctacttgatgcggaagctgggggtgcagacgtagcgttctgggatgaagacgtcccatcctctgctgtcacatccgtgctttggccgtccttgacaccgtccaactcgtcgcccatcgtactgtttccaccctcggcaatactcacactgaccccgtccgccgtggccgcaatggatgctgcttgagctgacgctgcagaggcagcagaggcctcctcgcccatactgcgctgcaaagcgaggaaaatctggtactccgacggattctggatgaaataggaaacgtagttgcggcaacgacgcgtaagatctgcacactcgcgcaaaccactggacacggcgccttcaagctcctccacaaagcatcgtacgactgccaggcccgggtattcgctgtgaattgcgttcgcttcggcctctgcttctgcctgagcttcagcggctgttcttgggctgtcggtgtcgttttcttgtgagttgttgatggtaggcgtatgtgggcgcatcgttaaggctgcaactttagatgacggaatctcccacttgtccatgacgtctcgaagcagcgcgatagtgttcacgcgttcatccagaggcagcacgtacacctccagcacacagtcgcgacgccggaagccgcgcgagatccagtggccgctcaccgtgagcacattttgtccaaatgcagacgtccaattattcagcgacaggctcagcacctccacatcggccatcacctccttcaaaatctctcgctgcgagtagtacagattggccaacgccagcttgatggtgtcctcggacggcagtttaggcaaggggccacccatgccggcgccgccgaatccgagcgccccgccatagccaaagttgagtccaggggtgggccactccgtagatccgccgaacagcagcatgcctagctcggttcccatgtgcgagacgtccagcggctcgtactgtgctatcaggtacttgagcagccgatgtgtcaggatcttctggttggtcgcattgttcacactggcgttcaccgcgccagcgccactattcccgctaatacttgagctgtgtcgccgcccgcgcagcactccgccagtcgggccggcgccggctagagtagaatagtcgaagaacctctggtccaactcgatggccgcatcgttcagctcgaatcccgccgggaactgcagtgcgcccgacgtggccgccccggccgtcgtgccgggcagcgtcacaaagccggccgggtcgaactccgtggccgcaactccgagtgtcgcgctggccgcggccccaatggcggcggcctgctcggcctggtccaccacgagcttcctcctctttgacgccgcggcgcctccactggccgcgcgccggcgggccgtgcgcagctccagtagctgatgccgctgcttgcccccgagcggctcgccgggcgacagactgcccagcacgccggccgtgtccgacggcagcagcaggccggccgaggcggccgaggccacggccccgcccgcgggtgacgcgaggctctggagctgctgctgcagctggcggcggtgcaggccgcgcgggtactcgtagtcggccgcgcacttgcccggcgcgtacttgtggtgcttcttgcgcaggtggcggttcatggtgctggtgccgcccgagtaggcgaagcgcgtggtctgcgcggggcacagcgtgcagatgacgaacttgccgctggcgtccttgacgaagtagtcccagatgaagctgggcagcaccatggccgcctcggccttgtcgccgcccaggcggccgctgcgcccgcggcgccggccgagcccaacggacacggaggccggtagggcgacgtcttcgacgtggtgcggctcggcctgcgcggccgcggccacggcctcctcgatcgtgggcgccacgttgacgttgaccgcattgaccgcgtcgtcctccggcggcttggcgtgttgttcgtctacagcggcgacctggccgtcgtcactcggttcaaggaccggcatgagctccatggttgaccgcctttgccttgcaaatgtatggccgcacggtccgcgaaccgcggcccgcgctgattggtcatctgtgtagcttaaatcagtggtagaggctttcaaatgtggttaaaagaatatgtttgaccatggtgcagtcttatcggtacaagcactccgccgacctgagttggttactttgtttctgttaggagctgcggtaggaatgagattccaaagcctaaggcgatgagggcgatcacagcgagtagcacgtacgcagccggcttgagtatcatatcgtccataacatccattgcctctagattggcgcgtaggtactcgtcgccgtcagcagcagcccgaagttgtttgagtttgcgctttgagaccttgaggtgctttttctccagcatcctcgaaactctcccaattggagggttcttcgccaagttctcgatcaattcagggtccttgctcagccctttaacaaaactcgggtccttcttcatggcggtgtccagcttcttcgcgattggcatgttctccacagccgcgacaatgtcggcattcttgcgcgtactagcgagctggctgcttagaccagagttcttcttgaatagacctttgactctcgctgcagctgaggacaggaacgctctctcttcgatctccactctcggcaaggtatcggtggggttgtcgccttgttgtggcgaggttccatccgtggtagggaacttgagtaagcggtggcgtatgatgccatgctggtcctcgttggctgcaataatgccagggcttataatgaatgcaaacaagagcaagagtagcatgtgcgtcgcctgcatagctcccgcctttcgactttcggacttgtgttttttgcttggggggtattgggccgattcggaaatgaacggcagtacacctaaagtagaggacagcagtgtgtctcctccgaatgtatcaatgatctgacttgttttatggtgcgttgggtgtcatccgacttcgcgttataccttgctgcactacaagtactagcaattggattgctatcgttcgacgtagcgtggtgcgttgggcgcagtagtcggctaaactgtacgtgtatgagcgaaaaatgagctccgaggggtcttcggagccccttttcggccgcagtcgaagggagacagcccacaaggcaaatacgccaactggagtcatccagcttcgcgttacgatggcgagtgttgctccagcgcgatgccgcgatgtccaacgccgcgtttgctaacaaccaaaatggtgacgacctggtcagcttgacccatgatggacttcctcctctcttgctctcgtggtgcatgcacgactcatcatgagtcactcgtgccacgttgacgttacagaacgttagcctatgtgcaactttaaaggtacaggatcactccaacgtcgtgctacagttcgcatggccctgggcccattgtagctatttgcgttgctccagtagattcatcaacatcttcgaagacgaacgagaattgggttgtccttactttcgagtacatttcaaggattttcgagtaacgagtaatgtactcggactttcgagtacataaacttcatttgaacgcgagcactgcatcaacttgctactactgactcttctccaaaggcgttgcttgttgggatgtcattcaggaacgtaaataacgtgctacaagcccataagaagatgtgttcttttgttttctgctaggtaacgcttaaattctctatttgcttgctcgcatccgcacaagtgattcgatgcgttacttccccagatgcattcatagcgtgccttattttggtctagttcagggtggcatggctttctgtggcgtctttcctaagtcacaaataagacttgagtgaaattactcggaagtcagtgaagtgtactcgcaattaagtagcacccaagagaatttattaaaaaaaaaataaagcttattcataagaagcgaaagctaaaggtttcaaataccgacttcttcttcctgatgtcatcccaccagtggctttacgcagaggccggcttccactggaagtcgggagataccagtgccttgtcaaacacaaatgcaacgtcctccaaactccccaaaaggtgcagcataggtgtcagcatatcgctctgagcgatcacgttcaccacgcggccactgtcgctatcccactggaagtacgtcgagccgtgcatgacgatccgttgacccagcagtctatctcgcaggtgtcgcccgtcgtgtgaggcacaaaggtgcgggaacactttgcgtagcgttctctcggtgagggtcacgcttgtcctcgtggcgatggtcacggacccgttctccatccttttcaagccgaaaggctccacttcgaagtcatcgaacctctgggagaaacaccagcttctccgcgcagcctcagtggcgtacccgtcgttgagcgctgtctgattgtcgctaatcgtagctgccatggcgttgaagcgcggcttcagttgagtaccacgacggaagaggtcaaagtattgtgctgccacgttccagatgtcctccttcgtctggttaccacgacgacggctttcgagcgccgcgatctcacgacgaagctgctgcgtttccttctcgagggtctcgagatggttcttctgtttggctctgtagcgtctttggatttcccggcgctgggttcgatgaagctgcagtgcttcagtttcttcctctccagtcgtcatgggtctaacggtctgctgagtctcttggggatcacgcggaggatgttggaggggtctatacgaagaatctgtcggggtctcggcacgcttcctcttgcctattgtagcggagcaatcctccgttgctgccacgtcctcatcttctggtgcaccacaatgcccctcccaattcgttgatagtgttccatgcatttgtccctgttcacagtgacgctgcagctcgttcctcttgggtcgctcctcctccgtgtagacccttcttgctcgcttggtatactgcactatgccgctgataaccgcgtcgctaaggagctggatgtttggtgggtggaggacgctggcatacatcgtggtggttaacggagcaaaacacgaatggcaacgaaatgggctgagaaggcttccagcaatagagatgcgaggcccgtttcgctcacaacgctcacgaattgagaccgtcgcgcctaaaataaagacaactaccgttgacaaatgtcttgaattgcatgaagagcgtccgtcctgcgtaggggacactgaatggcgacaacgaacttcgtagccccccccagggttcacgtgctgcatcagaaatagccatgattttgcagttcatagtctcgttgcgttgacgagcagctcgcagctctggtcgcggcgagtatgagcgcgtggtgtggtgtgtcgaggatgtgcaggcgaaactgccgctcaagtcatctgaagagcggcagcaggaggagggcagcgcaactattctggaccggctgtaccaggtcttcgtccagggcaacaagcggagacagctcaggtatggagcaaccagctattgttctgtgttggatagtagcgtgcgtgctaacgctgtgacttgactcttcttgtgttgacagttgaattacaacgtaggatcctgctgcaggctgtgacggaggcgcattacgaggagtgggtcgcgtgcatcaagcacgtaatggagcagtagggagggagcgcgaaggcggtggccgattcaagccggagagctgacagcccatggagcggtggcggtgacagcacaaacgctgctgctgctgggctggacgctagaagtacggggtcgtcgccgttatctggccgctctttcttgtaagtgtgcgtgccgtcttgacgtgcctagaagaatgaaacggagcacatcatgtaaggctggtgtggttggctgtgccatgggctctgcaggtgtatgtagcttcaagtctccgttgtaccggatgtagatcagtgcgtgccgcttgagcccgccgcatgcagacgacccacgcgtcgtcttacaacgcggcgacgaataagccgctccatcctggctcgtccgctagtcgccgccgcgtctgaaggtgcccttgcagggagggagcccgtgcgtcgctcatataaatcatcgggcccctccctccgaaatattacggcgcgcgtcgcacgcggcgactttcgtttgcgcccgggtcgcgtcagtcagtgccctcagaggccgaggtgcagggaggaagaggctgttggtgtgacgcgagcgaggcggatctcagtgccatggagctggaagcagtccgcgcgttggcgagggtgcaagaagaagtcgccgagaggcggagggctcctgtagtgcgctcgagcctgtccccgccgcttgagccttacgccccacaaaaggcttccaaagcttcgaatcgatcccgtgagtcacctttcgccagtctgcagcgagtgggacgccacgcgggctgagcctttgggtcggcgcgaccaagcaacgccacctcattcgcaccctccgggagggcctccctcaatgaccgatgttgtcgaaacagttgttgaagttgatccccaatctatgcggggcgtgtgtattgattcatctaaggctatcgggatatacttatggtacactacgtcactcaaaggacgacaccacgggtgcaggtggacatggaggaaatgcaggctctagcagtcggagctgtccatgcagtccagcggcagccgagcgaaggcgcggccggcctccgtgagctcgacgctgatgctgctgctgctctggctgagcagggtcatggccgtggcggcggcctcgtcgtcggtggcggcgaccgagcggcaagccgacggtgagcggctacgactgcggtcgcggctggacggcgagcgaccggccttggcccgctccagcgcgcgctcctggcggatgcgctgggcgtcctcgcgcgagatggccgaccaattgatggcgtgcttcttggacttcatgaggcggtagggccatacgatgccgaggcgccggcagttgcgcttgatggtgacggtggccacgccgagctgctgcgcggcctcgcgctgcgacatatggaagtacttggccatctcctcggtggtgaagtcgaacacgacgcggctcttgcgggccttcttggaggggctggccgcgggctcggcgcgcgccttggcggcggtcatggtgggcgaggccagctggcgcgacggggacgccaccacgggcgcggcgaaggtgttgatggtcatgggctgctgctggtagccgaaggccgtcgagccgcagtgcagcgggtgcgcaacactgaacgtgctgggcaccgcggcgcacgcggagaacggaggcatgctgctcatcatattgggcggacgggcggaggcaggtcggatcgggcggtgctcgctggcgggtgaattcgcgaatgactcgttccgaccgcggcgcatttcggccggccggccaggattccgggcgcaggcgggccggaggcgggggcgagcggcgctccggacgcacggactcctcactgattagcgctgacacgagcggcgctggcgccaaccggccactgcggccgagcggatacttttctcgccgcggcgcgccatcgcctgtctcgcgcgaaatcttagtccgcagacatggcctcgctgcgacttgctgcgcgcgtgcggccggcgccgcctctggccgccttcgttctggcgacaaatgagcctggcgagcggcacttgacccctttgaagttggaataagaacgccctggatcgcttgaacacgcgctcttgcagagaccggcgcgcgcgcccgcgctacaccccgaaacgctggacccacatggctgcacccgcccgaggtggaccttacaaagcccagcctgcgagcaggccactgggccagaccggggctgcctaacgtcgtcgcggaagtagaagcagctccacaccgcggccagtagtaggcaggtagatcgatcttctagcagcggtggcgggctcactcagcgcgacacatggtttggccgcttgcgcgcggcgtggctcgggccgagggcgcctcggatcgttctagccacacccgccttcaacttgcagccgagcctgcaggcattcgtgtctctgggccgcaaactatatgggatacccgccgctaaaaatgtagcagacccacgaatgcatcgttcgtcttcggagaagctgagggcgtttcggacgtcacgggcgtcgcacggttgcaagcttggataagagggtgccaccctgtcgaggtgccactgcagtctcggcggaggcctacagtatcctatgcacttcaacgtcaataaccagcagcgagctttgcggccggctggcggattttcgccgtctccttggagcgggatcagtgggaatctggtttgatcgagctcctgcaaaccgttcctacggtttcgcggtcactgtttggcgccggagctggcagcttgcgcggtggcagttccaggaacatcactttcggggccaccgcactcggttcagcgcgctctgctgtattttgcgttcttgcaacccaggcctcggtgtgtcttacgattcctgccatccgagcgtaactccgcggcgcccaaaacagatagcttcagcggtgcagggggcaagactgtggcaggaagagttggctagttttagatctgcaatggtcaaattgtccagtaaaagcgtgcttggcgcgcgtgattcgcagcccgcaaacttagggatccacgcgcgcttggatattcattcgcggccatcgcttcttgacacccatgtgaaatatgctctgtggacattagctagctggatggattctctttagtcggggtcaggtcggtcgcaaaggacacatcacaatacaggaatgagcggggtccaaggcaaagttcccgattttcacctcgacttcgtggctcttattaccgctgtgcgatagattacggtctcacggtgtatgctctgagagcaatgaaaatataaggctcacatttctctcgctgatcccgtgcccaccccaccccaccaccaccaagcacgccttgtgttgtacaagctttgctactgccactctaggctacgccaccattgcatacgaatcacgagctgtccacgaagcgttttgatcgggtgcacaatgcctgttatttgagcattatgatactttatgctaatttacactgagcattgctcagtgagcaaactgcaagctgcagcgcattgttcctcgcacttgacaagcaaacgatatctgctctggttctgaaaaaagaaatgaccgactcgagctctgcaaatgctctgcacacgggcatggtccaccctcagactggaccgaatgagccgaagcagcgagttggtggtgctcttgccttgatgacacgcgcgcgctgggggtctggtggatacaaaaccgcttgacacaaggtctgaataagcttctcggagcgtggtgtccgaagttcggactccgaactcaactgcaccgcgcgacgcgccctctagccaatcagaccgcaggacgctcagttgtccggtgtccatctttcgtcattggcaaatggtcaaggtaacatcaagacgaagcgtccagttgacacgcgcattcgctgcaccaaggtccaatcgtgtccgtggccgactccacgcggatactgtcgggcgcctttcaggatgtttatggacgctcgatcccctgtcccctgtcggtatatcgatggtgatggccactcgctggatgttaaacggttggccccaagcccttcgtggttgagtcccgcgtcgcggatactttcttgtctccattacatgtatttactgagttgaaaaggtatcaaatgatctactcgcgcttttgagaagtggtgttgcatgtgctactggtccgtctgctcatgaatgccccacacgaagtgaattcacccagtgctgttcgtcaactgcagaagaacagatccgcaacaatttaggcagcaatttagaatacgaagcgaatagacctctgtggggaatggagagggacaaggtacaatacaacctacacacaggtccgatcaaatgaataggtaggaagtgctggaagacactggatatcggtgcataccgggcacttgtccactatgggccaatgcttttaagcaatgggccatagtggacaagttttaaaaaaagtatccacaataccccccccctagcctaccactcgtcatcttctacagaagtatgcacacttggcttttgcgctctctaagccatcactttgtacgaaggccgtttgatagggcatgtgctggcgatgttgtcgcccatgagcgcctcggatgaaacccgcctgcagtttgagtccgagcgtttgtcgccgctgcagaaaaaacttgttggagtgcgtcccgtgaactatggtgagagttaggcgcggagctccttatcttccttattagcaggatatgaaggggacgatggtcaacttcttcctcaactgcaaacccagctctgggcgagtcattcattgcgtacgaaagcggtcaagcagcttacctcaacttggccaatacattcatcaagcttaaaagcggatgcagtgacttcgtcataccaacgcaagccaaatcaacaatgtcttcttgcttgagatgggctccacaagatacatgtagcattcgcgagtcaattgaggtgctagccactaagatcgagcagcaggttggcagaaaacactaaacgcttgtaaagcgtatagcgcgtcggaccaagcgcgcgtgtgactatcagcacagccacgcattaactggacgcttcgacttgacaccgcatcgctgcgtggccaatgaagtaagcgataaacagcgctgctgtccaattggctggaggaggatacgcggcacgccgctcgttactgcgtcgcggtcgaatggactgcatgtgtccagacgccgaaaagcttattcgagctttgtgtcaagctccgatcatgtgataacgggaccattttgtacagaatattaagcgtgccaacgagtgcgagccgtccattcattgctttgtctgctcattcagttcagtgtggttgcccgcattttgctccggcaaaatgcacgcctatcacggtgcttcaacagagagaatgagaccggcacatacccacacactaatagtgtgacactatctatagtgctgccagcgggccacccttctacttaggttagtcctagcgctaatttgatactttatgtcagctcctgcgccgtccaagcaccttcactccaacaaatgcggctactgcttcagcccttcatcacctctgaacgagctcttacgaagcaatggtatcactggcaccattggctcgttattcagctggtacggtacagaattctgcccgaataaggaacgggtgtacaactaatagcctcacatatttaatattattttccagtcgatgtggcgatagggggatgtgcaaggtactgaggtactaaggtgaaaaatccagtgccaatcatcagctctccaccctcgtttgaaaaatggcgcgcatttagcgatcttactagacttcaaactacatgtaccgtagtggtagactcgcacttttgcttttgcacctcgccccacaagcccacctcctcccccactccacccatgaagtccacaccgtccaagcgtctccgcctcacttggtctgagaaagtgggcatcctcgacaaggcagcccgcacacctgctctctcctacaggggcctggctgcgtgggctatgacggagttcagcctcccggccgccccaggaaagacaacgatatgccgcataatcaagtcaagtgcagtcctgctggggcggccgctggagaaggaccaaggatgattattcattgtattaagcgacacattctatcccgcaagatgatgcaggctctagaccggcttggtgaagggctagataatccctacgaggtcgaccagttgacagcgctgttgtggtgcgaggatgcctggtcaaaggttggtgcttcgaccatacgccacattccggactcgtaggtaaagctgctcttcagttcattttgaaataactaaatcagtacattggaaaagtatactcaacttaacatcaatttatatattctgcgtctttatatatatcaggcgttccttactcaggcagattactgtaccagcagaatagcgagccaaaacgatttgctttctgaaggagatggctagctacaaatgatcaatgtcaagggatactgcgcgtgtttactagctcttttcctagccaagtttccagccacagtcttgccccctgcaccgctgaagctatctgttttgggcgccgcggagttacgctcggatggcaggaatcgtaagacacaccgaggcctgggttgcaagaacgcaaaatacagcagagcgcgctgaaccgagtgcggtggccccgaaagtgatgttcctggaactgccaccgcgcaagctgccagctccggcgccaaacagtgaccgcgaaaccgtaggaacggtttgcaggagctcgatcaaaccagattcccactgatcccgctccaaggagacggcgaaaatccgccagccggccgcaaagctcgctgctggttattgacgttgaagtgcataggatactgtaggcctccgccgagactgcagtggcacctcgacagggtggcaccctcttatccaagcttgcaaccgtgcgacgcccgtgacgtccgaaacgccctcagcttctccgaagacgaacgatgcattcgtgggtctgctacatttttagcggcgggtatcccatatagtttgcggcccagagacacgaatgcctgcaggctcggctgcaagttgaaggcgggtgtggctagaacgatccgaggcgccctcggcccgagccacgccgcgcgcaagcggccaaaccatgtgtcgcgctgagtgagcccgccaccgctgctagaagatcgatctacctgcctactactggccgcggtgtggagctgcttctacttccgcgacgacgttaggcagccccggtctggcccagtggcctgctcgcaggctgggctttgtaaggtccacctcgggcgggtgcagccatgtgggtccagcgtttcggggtgtagcgcgggcgcgcgcgccggtctctgcaagagcgcgtgttcaagcgatccagggcgttcttattccaacttcaaaggggtcaagtgccgctcgccaggctcatttgtcgccagaacgaaggcggccagaggcggcgccggccgcacgcgcgcagcaagtcgcagcgaggccatgtctgcggactaagatttcgcgcgagacaggcgatggcgcgccgcggcgagaaaagtatccgctcggccgcagtggccggttggcgccagcgccgctcgtgtcagcgctaatcagtgaggagtccgtgcgtccggagcgccgctcgcccccgcctccggcccgcctgcgcccggaatcctggccggccggccgaaatgcgccgcggtcggaacgagtcattcgcgaattcacccgccagcgagcaccgcccgatccgacctgcctccgcccgtccgcccaatatgatgagcagcatgcctccgttctccgcgtgcgccgcggtgcccagcacgttcagtgttgcgcacccgctgcactgcggctcgacggccttcggctaccagcagcagcccatgaccatcaacaccttcgccgcgcccgtggtggcgtccccgtcgcgccagctggcctcgcccaccatgaccgccgccaaggcgcgcgccgagcccgcggccagcccctccaagaaggcccgcaagagccgcgtcgtgttcgacttcaccaccgaggagatggccaagtacttccatatgtcgcagcgcgaggccgcgcagcagctcggcgtggccaccgtcaccatcaagcgcaactgccggcgcctcggcatcgtatggccctaccgcctcatgaagtccaagaagcacgccatcaattggtcggccatctcgcgcgaggacgcccagcgcatccgccaggagcgcgcgctggagcgggccaaggccggtcgctcgccgtccagccgcgaccgcagtcgtagccgctcaccgtcggcttgccgctcggtcgccgccaccgacgacgaggccgccgccacggccatgaccctgctcagccagagcagcagcagcatcagcgtcgagctcacggaggccggccgcgccttcgctcggctgccgctggactgcatggacagctccgactgctagagcctgcatttcctccatgtccacctgcacccgtggtgtcgtcctttgagtgacgtagtgtaccataagtatatcccgatagccttagatgaatcaatacacacgccccgcatagattggggatcaacttcaacaactgtttcgacaacatcggtcattgagggaggccctcccggagggtgcgaatgaggtggcgttgcttggtcgcgccgacccaaaggctcagcccgcgtggcgtcccactcgctgcagactggcgaaaggtgactcacgggatcgattcgaagctttggaagccttttgtggggcgtaaggctcaagcggcggggacaggctcgagcgcactacaggagccctccgcctctcggcgacttcttcttgcaccctcgccaacgcgcggactgcttccagctccatggcactgagatccgcctcgctcgcgtcacaccaacagcctcttcctccctgcacctcggcctctgagggcactgactgacgcgacccgggcgcaaacgaaagtcgccgcgtgcgacgcgcgccgtaatatttcggagggaggggcccgatgatttatatgagcgacgcacgggctccctccctgcaagggcaccttcagacgcggcggcgactagcggacgagccaggatggagcggcttattcgtcgccgcgttgtaagacgacgcgtgggtcgtctgcatgcggcgggctcaagcggcacgcactgatctacatccggtacaacggagacttgaagctacatacacctgcagagcccatggcacagccaaccacaccagccttacatgatgtgctccgtttcattcttctaggcacgtcaagacggcacgcacacttacaagaaagagcggccagctaacggcgacgaccccgtacttctagcgtccagcccagcagcagcagcgtttgtgctgtcaccgccaccgctccatgggctgtcagctctccggcttgaatcggccaccgccttcgcgctccctccctactgctccattacgtgcttgatgcacgcgacccactcctcgtaatgcgcctccgtcacagcctgcagcaggatcctacgttgtaattcaacggtcaacacaagaagagtcaagtcacagcgtcagcacgcacgctactatccaacacagaacaatagctggttgctccatacctgagctgtctccgcttgttgccctggatgaagacctggtacagccggtctagaatagttgcgctgccctcctcctgctgccgctcttcaggtgacttgagcggcagcttcgcctgcagatcctcgacacaccacaccacgcgctcatactcgccgcgcatgaggttatcccaaaccagagctgcgagctgttcatcaatgctatgcttggtgtcctcggaagggagcgggtgagagtacgacgaatcatcgaactgtgggtgctcccaatcgcgcgcgacgcgtacgacgtgctgcgcgagcacccactcttcttgatctacgcactccttcagcagctcagcggcactctccattcgcagaggcagcgatgaacctgacgccgttgaacactcctccaagatgagcaagaagttcgcagccgtgcgtagctctgatcgttgttggcagatcgcgagtagatccatggggtcccctgcagcagggaacagcaccttcaggcgtgatggctcgctcttacgcgccacgtgcgctacaatctcgcagtactccgcgatatcaacctccggttgctgctctccttccccaggacgcagtagctggatagcagtgtgtagtttgtcctctggacaccgcttcgcgaagcacgcttccagcatggagtgaaggaaaagctcctgcgtaggagtagacaaggcaaactgcttgcggacgccatccaacaccagacgcgcccacgaaagctgctcgttctggacaaggaagcacagcaacgtgtggaaaatgggctgcacacgagcaaacacgtcgtagcacgggagcagcacgcccgaaggcacgtacacatcttgtgatacaccgaccagcagtccaaatgcttgttcagcaccaagcaccttcacgtcgaagtcaaaccgcagcatgccatccttcgcagacggatcgtccaccgacgtcacgcatccacgcatgttggtatacccgtccttgaggggcattctaccagtacccaagccaacaccagttccactggacaggaagccttccaacgcgatcccgtactcgctgataacttgctcgtacaattcagcggtggcaggtgctgtaccaaactcaatctcgtacgttttcgctcgtaaaggatcatggcaagccaagaaagtctccagccgacgactgtcctgctcaaaagccctggtgtgcgtcatatatacaccgtctaacaacggtagccacaccctcatgccttcaggaccgtacaatccgtaaatgagtcggcagggagctggccatgacgcgcaggcctgtggcgtcacgaatagtctggccattgtactcacgttggaacacaataatcgttgcgaccgattctctggatcccacacaatcacatcacctgcactgtcgaggaatgcgaatcgcggcagtacttcttccggtgtgtactggtcgggaacttcgccccccacgagcatgttcacgaagctcgatagccaaccttcatcgtcctgctcgtgctcgcgctctgcttgatacttacgctgctgttgctctctcaacttttcatcctgaatatgtaagaatcgcggcagcaccgcgaaattcagaatgctgtttcgcctgcacgttccaatgggctgggactccactacccgtgacggcaaattgacttggcgcttgagctgaatctccattctgaggtcgttctgcttaatggtgcccccgtgcttgaggtcaaagcaccataattcactcctcgacacgcaaaacagattcttctgcgcgttgtcactatccatgatgtagaaacagtcgtcagcgtcgtccccgatagagcgcccgcctgatactgctgctgctcctcgactacgcgcggcgttatcgccttcacgcgcgaacaccaactgctccaaaatcgattcctcatccagatgattcctaggatacgcctgcaagtgcagcgactggtgcttctcactaaatcgcgtgaagttcaccacaatcgcgtcttcgcccacccacagcagcgaatacacgaacatgtcctgctcatcgttcacgttgccgaacatccgccactttcctgtcacaatattcagcaagcaaaagcctctttggccagccactgccatgtgattcccgcttgcactcagagccacaaggcggagagggcagcacttttcgaactcagttggcacactccagttcacgcaagaggtcagcgcgcatggatcgtcaagtgaggacgcagccaccaagcgaacactcttgctttcaagcaaggccaaatgagacgatttacctccagagagcggcacggttttagcgaaatcaaattcagcaaaggccatagatgatcgcttgcgcatcttcacgagttctcggtgggcgtgcagttccctgagcctcttctgcttcgcgaggtaaagcttctgagcgagcactgcgttgccgtattccgtgattacattcaggaagtggttcggattccacactgggaatagcgcaaacaacagcttcacatacttgtgtttcgccacacgagttgaggttccctgaatcgcctcccacccgtcaaacttcgcacgccgctcaaactccataagaggggggcgctcttccagatcacagtctccatgcagcgcctgcatacgcagcgcgtactcgcgaatacacaagttctcatcttccagcatgtgaatcccgtgcgcatccatgaactcggacgcagacagcgcctcaacagccagagggaagacgtcctcccacttcagacgcatgaatgtaagcgccacttcttcgttgtccggcagctccttgatcacgctgacaatctgctcgaaaggcaggttgaccaccttcaagtcatcattgatccctacaagcaggtctccaccttgaatctgaccgcacgcttcagctgggcccacaccgccgtcagctggcttcgtaaagctcttgtcacttcgaacccaggcaccacagcgaccgggggctccagacagcgacagacacagcccatcttctcccttctgcactctggcctccaccgtctcgaacagattcgaggcctcggtcagctccacgttgttctcctcttcaacttcgcgcaaaatttcgtcttccggcagctggacgagttgggtcgactgctctccacgaggcaccacgatcagcgagttgctctcctgcgcccacaatagcgtgtgcaccccgaacgcgcacacttctttgatgttgtgctcgtcgatcttctcgggtcgctcctggttgtgctgcggcaagctcgacatcagtcggcagccgtcggtggagaaaagtgagaacccgcgcagctcgtagcccacgacgatgctccggccgtcgtgcgaccacgccagcgccgtgacagacccgacgtcttcgggcgtatagccccaggccacgaggctcagctcgcgaatgggctccagcgccagcgccagcgcggactgcgtcttgacctctttattatcatccgtaacatttttcgccttcccaatcggccctgcagttctcaacgatagccgaaacagtgacacaccgccgtccgaccacccgagtgcgagcctggatccgctggcgtccaacttggtggtcgtgcaacgaccattacccgacgacgtcgtcgtggcatccgtctccctctctgtgttaatcagtgacagcagctggtcgatactcttctgtgccggagacagcagcatgatgaagcacttgccgccttcgaagctggccacgagatacagcgacgcaatcttggacggcaggtcggctgacgcgcacgtgagatcgtagcagctcggcggctcggcgtcctcgggcaccgccaggtgggtgcgcacgtcgatcttccagatcttagtggcgtcgctgccggcgctgaaccacgaggaggacgagccgtcgctgccgtccaacgactcggccacttccacgacgctgatcatgccgctggccatgcccacgaacaggtacttgctgccgggcaccgcgctcatggaggtggccacgtcgtcgtagtcgctctgactcgcgccctggttgagcgggtagtcctccacgaacttggccgcaagttgaagccctttgccaatggccgccgctgtgctgtccgcctcctcctgctccggctcggcgaacgacggctggtccagcatggcgttggcgtccaccgcaaggtcctcggccgcgtggctgtcgtggctctcggcgcgctgcagcagcttgtgcagcccatcgaaggcgtagaactcgacggcctgcgagtccttctccacgacggccaggcggtccccggagacccacgccgcccacagctggcgggacgcgctctcccgcagacgtccgtcattgccctcctccccgtcctgagcgtcctccgcctccagcgcctcgatccactggccgccgcgtcgacagcgcgccaatagacgacaccccgtgcccgccagccccagcgacgcgctccacagcgccacgcgcgaggacgtgacgcgcgcgagcacgcgctgcgacgggtgcatggccaccgccacgtcctccagccgctcgcgcccgcgcgccaccgcgtaggtgcgcggaggcccgctgcagaagaacatgggcctgccttgcttcgctctgctacaatacacgtggatcgatcgaagtgaccgtggtttgttcggtcgcggattggaggctttcggtggttggatggtgacaatagtctccgattgtgattggctccctttttaggctaatggagcgattccaccgcagtgttttgaaactttaggaagcaacgttagtgctgctatcgcagaccaaataggattatatccgtggtacgtcaagtcaaacgatgacccctcttgacatctagctggtatattttcttgatctcattcgtcccagcgcgagtgtggatgaatgtatcgctacggtgatcggtttacaaggtatttgcgaaaatgagtacgagatggagctgaacaaggtgggaacattccacattccacctgacaaagaattggacgtgatggacgaacgagctatatgtgtgggcagatccagcggtgtgcaaccgacgacactggtacgattcagtatatatattcgagcagtgaacgaattgaagtaaagataacgattgaggcggactatatgtaatagcactagagataagccttttcattttcaagtataaaacttctacaagctgcaagcagatctcagttcgcatttttaattgtgttttgtaaagcattgccacttgatatctggcatctacagtcttaaggccaatttccgggcagatgctgcggctgcgaagcaggcgaaggagatgaccgtagctcataagaaaagtacttgcacttgtacttgtaaacgttagtgcgccttacgctttagggaaaaagtgacctacactctcaaagcgtggtccacaccactaactccaatagtgggcggccactaattgagctcctactgtcttctccggcacgatcagcatacgtcagcaatgaatggctcccccttcgcggagacgcgctaggccttggtggcggcatgtccgctgcttccgtcgcccgtttcggtcttgtagtcttggttcagctaggtacttgggtcacaactcctttgcccggcaactgctgtcgtggccgcaacaaaccacgcagtctcagccagcacgcccttgttcttcggtcttgtgttgttcctgcgccttatgctgatccccttgagcaccttcccttgacggttgacggctgcaacagccccccctcgcgggcgctcgcgcctcgccgccgaatcagcttcctgggcgatgccgtagtcatcaacacacaggaagtcggtggctgagcactgagcgcgcttggtttgtccgctatcgccgccgcgagtcgtacccgcgtcgagttctcagcccagagacactagtctcacatccttgtccgtctaagaactgagggcgtccgcggcggagccgcattagcgcccccgagaacgacgccgcggcgccgctccccgggagggcgtcaccccaacccgtaccaggattaagaaaagcaatcaattaaaataaagagggagtttataccaaaatccttctatcccagccttcgccgagccctagttattccagaaagcacgtgttcaaaatctgaaagagggggtacggtaccccgggtaccccctcttccagatctgtgatttgccgacaagatttattcttgccctttcttcgcacttttgagatagtttttggattctaaaacctacgggaatcgctccaatcacttcgtcgaatttggtactccattggtcgaattggtgtaccaaattccaatcactttgtcgaatttggtacaccattggagcgattcccgtacgttttgaacacggactttctggaatagaaataagattcaaaacgctacaggaatcgctccatttgcatccataatttttatatttttaatatttaaaaatacgttgaagcaagcttttctaaggcgccattcgctgcgccatcttcgggggtagtctcaaatttcaaccacagaacacgtacccggctctagatgagctcatgcactagccgctagaataggatgccaaggtaaatcggcctaaatgtctagtattattggtaggtgttttggcccgtttatgaaatagtgtcctagtcatacagttgtcgattgtagtcattccgtggcgttatatctgcttattctccatacaactctatattgagtgggtgcaattcaagtagctacagatccgcgagcgcgctcatgaggtgttaggtgctcgtgctcgctcccgcgactcgcgagtactctcgctcagctcgtgggatgttagcccagacttgatcctgccactctgcaatccgcctcacaacgcttcgtgctccggacatggctgccatattcagcccgacgatgcgaatcatgcaactccacagcgtcttgttcatggcgatcgcagttctatcgacatgcaccaacttgatttctgtggccatgggctcgacgggatggtaagcgtcagttatcactcctctcgatgtcgatgtcgagttatgtgacggtcacacgcagcgacgcttaaggactcgcgagcacgccatcgacgacgaggaagagagggtcttggatgtaaaaagcgccttgtcgaagttcgctggcaaaatgtccaaacatccgaaaaacgaagaggaagttttccagcgcttcgtccaattgggacttctcaatgaaaaatccaatctattcgagagtccgctgttccagaattgggctagctcagttgcaaaagggttcaaaacgaactctaccggggccgaaagggccattgctgcggcattgatgagggtgcgcagcgacaagtcctagcgaaaatggtcgtagaggcgaagcaagaggcgagtaccgagagtatggctaccaaactggagaaggctcagatggagaactggctggccaaggaatacactgtggatgacgtgtttcgggctcttaagctcgataaaaaagctacgtttccttttgggacccgctggtgagcacctggatggagtatgcggatatgacgaaggccaagacgtacgggctcctgctggcaaaaatgagggtacacgagagcgacgcgaatctgaccacgatgtttattggggcagagaagagcgcggacacgaaggacctcgcagtgaaattggagcaagctcatatgtcggattggctccgtaacgaacggtctgcagatgaagttttcaagcttttgaagttggacgatgatgtggataacgttctgagtaaccccttgctgggtagctggatggcttacgttgagaagttagatggagatccgtacatgctcttgcttgagaaactcaagacgtccgagctcacaaacacagccaataagctcgttatgatgcttaaagaagcgaaggaaaaccccgttacacgcgccgttgctactaaattggaggcagcacagctcgacaagtggcaaaaggagggggaaaccgcggctagtgtgttcaagctgttggacctggaccagcataaattcttgttcttagactattccgatgtgcgggcctgggtgacctacgtcatgaagctggatccactaaagtcggacgacacgatattatctgtgttgacgtcacaccatagcgagcccaatttatgtcacaagcatggagcgatgcccccgacatggcagcaaagtttgaaacaatccttttcaacaagtggctcctcgagaagaaaacggcggatgacgtcttcaacttctcgctgaagaggtatcaccaaagtagtttttggtcacactcgaacatgagcatgtgggtttccttcgtgaaggcggtggataaggaggacccgttcaacacgatgctgtgttgcagaaacaactaacaaaggagcaactcaagaccgcgctgtaccggggatttgaagacccttccatgaagtcacttgcctcgaaactgcttgtagaaatgcgactgagtgaggcggtatcagtgagggacgcttttgttcgattaggcttgaaccaggccagtgaatcatgctttctttttgaaacggagtggtgtgcaattagaggatcaacagtagcataagctcagagcacatccttattacaataaactgttgtcattgcgtgagtaaagcaaaatcgttgagcgatcgaatcgcctcgaagatgtggcgcgacttcttgatgctactggcaggaggtcgtagtgtaggatggctgtgctaaaactactttaggactcctgcttcatcgcgccaactgcgtgcaatgaggtactgccgtaggcgtagagcaagtagaaagtcgaacagcctgaaggataaatgtgcacttttacagatgcttctcgtcaatccgccaaacgagagggctatccgcccaaattcgggaggattaaatccgctgaatatccgccaaaacgacgcctcttgtgttcctcaaacgcaacagcggattgtgtaatccgccaaaacgtacatattcgccaaaatggcccaaatccgctgaaattcctgtctgaggaacacaccctaagtccttacccgaatacaagtcccctcgtcagaatcgtacaatttgagaattagaaggccggcttatattcggtaaatccgttagtatttggtacaattatcaatggacgcctgccaaatatagcatagtcgagcggcttatctgcagcgagtaagcccgacttaaaaaagatatatgtcgctttatcgcaaaaaatctctaccacgaaggtgttaaaagtgctacctgtgtccgaccgatagtgtcctaaataaggctgctgctacagtgacgttggtacagtgaggtgtgtacccgtcactttgcctcggacacgccgagcgcgtgaatccttctagatttcctcattctgacttttgcgcacgtcgggcacaagcccctcccgccacgatggccaccgaagactcggacgtgctgctgctgctgctcacagacgccttcgtgaagcaaggtgaggcgctgcatgtcgctcgccgtgagggcttccgcctcctggtcgaggaggcatggaagtggcgatgcgcagccgccattacctcacggcccaatgcctggacatgccctgtgactctgcgtggatggtcctgtacagatacggaactgacatcaacttcctaaacgccaccagccttaccaagtacgttgaactgcaggtgtgttgcatcagatgcgtatattaacaggacatgaatgctatgaatgctacaggtcttcctttcaccagctactgcgccggttcactagctactactacatcccgcgcgcccgctccaggggccgaccgctcaagctccgataccaccaccaggtgttggggctggtcctatgcttctatgttggctccatggagctgagcagcttgagcatgctgttcggtgttcctccgagtacattggcgcggaccctgtgacgggctgaggaagcactgtccaagacactggacaactacgccccgcacgcatcgcatgaccgtcacccagccgccagactgagctggcgaagctcgtcggagctcgagagtctctgctgaagcacaccttcggcttcatcgatgggaaaaactttaaggtgcacacaacgctcattatgaaactgaattgtattgcgataagttacagctacgttttgttgctatgaaggtccagcagccctcgaacgctgatctacagaactccatgtacaatggctggctgcactcggtgtttgtcaccgggacgatctgcttcgcggcagacggatgcatcgtgtgggtcaagcacaactgccccgggtcgtggaacgactccgacacgtcgctgggcttcaggaacaagttgctggaccccgtgtactgccccgacccgcgcaagaacgtcgtctcggactcggccttcccccatggtcggccgcatccttacgccgctcaaggacggcgacctcgagcgcctgcacccgtcgctgaggagctcggcgcggaccatccacaacgccatcaccgctgtgcggagtggggcatgggatgcgttcaaaaggtttacagtcgcctcaatctaccactaccttacgagccggcactccgtgggctcagactgaacaatttgttccgcttggcaaactaccgtgttcgcacggttggcatctcgcaaatccgcacaaccttcgcgggcgagatggagctgccaacgcacctgtattgctactttggtctttgtaatgcattacaatacatgtagttgtgctgcttgatgaatacacttatggactttgaacgtacatgtctgtctcgagctagtcaaagcaagaaattcacgttgctgtctatagatctaccacgaagttgtaagacatgcaaaccatgagctttgctggttaagaagtgcaaagacatcgagtttttcatgggtaggaatcggagcatgtacagcaacatgagtagttcatttgtgagcctttagagctacgagctacactacgtcgatgaaaatgaaagaacctcactaccttgtccatgatctgcttccgctggacgccgtccttgcctcaatctttcttcttcaaggcgccgatcaagatcagcaactcctgggtgcgcgcacgcgcctcttcgcgatcgcggcgtgcgcgctcctccatctccagcttctctcggcgacgacgttcctccgcttcggccttggcttcggccttttcctcgcgacgccgcttctcctcgtcggcacgacgcgcctcggccttccgttcgttctcctcgcgtagcagcaggatcgtctccatgatgctgccaccatggtgtgggcgttggtttcaaggccgctcaacttgttcttgagcgcggtggtggccttcatggccctgatgcgtttggcctttgcgaagctggcctccagcgtctccttgtcctcctcgaaggtgcgcttggcgcccaccgcatcccggaaactggtaagatcggtgcctccgaggcggttcgaggaggtcttgtacatcgtgtccttcttcgggttccctggtgatcgtccttggtcgactggcgtccccgtcgagagaccgccgtcgctggcaacgacggtggaagggctcttgcgttgcttgggtggccccccagagccagactgccggccattttgaggtgctcgaagcggcgccggacgcggagtacgagcatgggctccgagctcatcgctggcaagtggtgccgccagcagctcttggaacccgcctcgactgggtggggcgctggagctcctggagtcgcccgtacggagccatctgtgtcgaggtgctcgtcgtgtccggtgccactctcggcatcatggtgcacgttgtcgccttcaccgccctcgaagaagtcgtcgtcgtcggggtcagcctcgaacgagaagtcgggctccacgaagccctggtcgcggccggcctcgtcgtcgatctcgatgacattggccttgtcgtcaatggcctgcttggcctcgttggcgcgtttgatgcgtggcggcatctccggcatgcgcgtcggcttgcgagcactatacagcgtcttgaacttgcgcctcaagctctcgaagtcgcgctccggtgctccacgggcgcgagcagcgttgtaggtcaccacaaggcgctcccactcgtctcggcccagcgggagcgcctgctcgacgaggtgtaggagtcggtcaatggcgaacatcgtgtagttcgtgctgccggagtttttgcccatctgtagacacacgaagcacacgacgacaatcaggcaggcagccaaccagcgagggagtgaagtaaaggaggagggcgacgcacgggggaaggagcttggagaggaggtgcgggagtgcgcttgggcaggaggcttgcttgcgagctggcaaatagcaaagtgagagacgccgtcgaccacggcggcatgcaggtcatctaccgagaagcaatactcaccagccatgcgccgtcgatcttgaaaggctgccgacaacttcaacgcgggaaatccgcgcgcgtaaaatgccgccaacgcagacaactggttcaaaacatcgaagggacttggaggatgcgccttcgcgcccaaaatcaacgtcgttcacgtcgaacacaacacccacgtcctgcagctaaataaaaaaatgaacccatcgttacagtcaccttgatttcattcatctcatcatgcatgtttctcatagaccgacctacacgtagcgcttggccctcctgcagcgtcttcatggatcttcctcgtcctggatgttgctgtggcggcattcagccgcttcgcagcggcacacgaaccagaggtcgtcgccgtagtccacggtcacctcctcgccgcgacagatgtctcgcgtagtcaccaccaccacggtcgtgcgacggccgttagacagctcgacgaacgcagcggccggcctgcatgaatgattcacgaagcgcatgaggctccccatgcgctccgcgttgattgcagcgcagacgccggtcgccggttgctcgggccgctgcttcaacacgagcctgtagccccagttgcgcggtcgattcgctcgagaagcgctcacgtgctctatctccccgaggtactggccgagcaattcgccagcgtcgatgacctcgccggccacgatccccaactcgtgcgtgcgctggttgcggccgaggaaaaccttggacgaatcttccaggccgttgccgcacttccccgagtacggacagcagttcgggctgcagaagatgtgcatcagcgcgttgcgacaggattccgtgcggcacgggttccagcagttgcaggatccgacgtggcgcaccacggggaagatcgtagccagaggattgaagctgtcgtgcaagtgcgcaacgctatagggccatcgcgctggcgcgaaaatgtcgccgggccgcgacgcatgatggcgagccagcggtgcaagatccaccgcggatggagtcgccgcttgctcggcggcagcaccacggatgacgtgctcatggacggaacgagggcgcgcgtacggggccgcggcttctcggcgtgcttagcggcctcgaccacgtgggtcattcgtcttggtcgtcctctgtcgcggcggggatcttggtggtgcctccagcagcactggagacgaagtcgtcgggctcgcatacgcacgcgccggctccttcggcggcgtctcccgtagtggcggtgtctccggtggtcgttgcgctcttggaccgacgcttggtccgctccggagacagccacggcggcgtagccgtccccgttgcgctcgcttcgccgtctcctccgcagggtcgacggctgtggccatagttcggcgtcgcagcgacgttcggcggcgtgttctcgtcactcgaagagtcctcgatgcagcgcagttgccagtggatggcggagtgcacgtggcggtccatgtcactgcacgacagcagagtcagccacagcaagcacgacagcagcagtttgcaccacacatacctttctgtgagtcggcggaggtcgacttcgcgccttcgccgtccgatttaaaagtgaacgcaacttcaagttgtcggcaggaagatataatcgaggcaataagccgccagagtgaaggaaacaccttcgagaatgatggtcagattaaactatacaaatagcaagatataagcttatgatggcttcacgacataaaggcagggttaggactgcttatcgagaccgatttcgtgtctctgcagatttacgtcgggcttatgaccccgccatattactgcagataagccgctcgagtaagccatatttggcaggcgtccaatgggtaggagcgcaacctcgaagcataactacccgccgcctctcttgcctagcaagtgagaaaaagatctattattattattaagttttgcgtgcaggcggcttcgcaagcgatacctttatgagaaacctttttttgtttttgagcattaaagaaaaatgcatgctatgtttcggtttttgttcgtcattttttatgccctgaaatgatctgtagaccacgacttctactcgacgagatgctgcgtgccgtagacactctcaccagcggcaataatgccgtacatagcggtggtggcgaccgaagcgttctccggtgttcgaatgggccaatagtgcagtcgtgccaagggctttgaagaaggttttctacagcaatagcctgctctgatgtttgagatcttgacaatgtctgtaaagatttggcctcatggattgagggctatacagacaaaatgtctcctgcggtcgcgcgttagatcttgtagccatgtatacctctcggttataataaaactcgtgttgtccaaataccgccgattgtgaagcgtgcacagtaatgcagtggcatagccacggatataagtatcagcgacaccattctgattcgtgcaacactgttattcaaaaggattatatgcatgggtatgtcaagctgcaaatacttctcgagcaaggttcgtttgttattagtttctctgttttgccacctcttccaaacttgcacgaagaaggttttgaagacagcgagtagccaggccacggaatgagctgtgtgcgatactgtttaggcgattactcgaacgtctagagagcgatgtcgaacctccacatatttacaagacaaccacacggaaggtcgaggagattggttgatttccgattttagcctcgcgactttttcggcgtacagagagagcttgttaacagttttaactgttgtttaaaaattggtacagtactggacacgaaatgcatgatatattgtgtggtagacaccaactacacaatggactcaattttgtcagtgacactttcatactttgatcaagacaacgatgctggggctccgaggacgcatgcttgcggcggccaagcggccgctgagccgcgcgtggctctcgtcgagcgcggacggcgccggcacggaggcggagcaggccatgcacgcggcgctgcagacgcggctagaggccgttcacgtcaaggtcacggacgtgtcgggcggctgcggctccatgtttgacatcgaggtggcgtccgcgcagttcgcgggccagtcgcgcgtcaagcagcaccgcatggtcaacgaggtgcgcccttcgtggtggccggccattggcctaaaagaatgccatcttactgaaatattgctgttgctattgctgcctgctgcagattctcaaggaggagatcaaggacatgcacggcctgaccatccgcacgatgacgcccgagcagttccagagcaagtagactgacagtcgctgctgcagcaattggccctgtaattggcacaaatatatagacagacacgggccttcacgccgaagaggaagtgaatacgtgcatgggtgaagcgcagtgcgggctagccctccagtctatgagctgctcgcgtacttggcgatgccggcctcgttgatgatgcagatgtggtccaggtcgcggaagatctcgttgtagtcgaggcagtagccgatgacgaacttgtcggggatgttgaagcccacgaagtcggcctggaagccgcagctctccgggttgcgcttctccagcaggctggccacgcgcaccgactcgggcgcgtactcgtgcagcatgggcacgagcttggccatggtcttgcccgtgtcgatgatgtcctcgaccagcagcaggttcttgcccttgaacttggccaggtcggcgcccgagacctgcacgttgcccgtgctcttggtgccctcgtagctcttgacgcggatgaagtcgaacgtgaagggcacgtagtcgcacttgttgtacttgtggaagagccgcagcttgtccacgagcgcgtggaagaaggcgctgccgcccttgagcacgcacagcaggtgcaccgtcttgccctcgtacgcgtagcggatatcctgcgccagcttctccacgcggtcctcgatcaggcccttggggatgagcaccgagtcgatcgagtccaggtagtggtgcggcacgaggaactgcgccttgtcgtacgtggcgtcgtcctccaggtagatcacgcgcttggggtcgtgggtggtctgggggtagagagagcgagacgcaacggggtcagttgggtggaacgtaggcaggcagctattgagcattgggtggggaggccttaccgccattatgctgctggggtggggtgaatgacactgacgtggtctattgacttgtggaccagtggagtggaagtgctgaagcagcaaaaaattgcgttacctctcaattgtaaatagagtatctctcaattacgatatacgatagtagaggtggcataaagtatgaaaaaaatctatttcgtgggaaatttgtggctccacagtagcaaaacctttacagaagaatatcaggaaggatcgacatctagtttctttactatatatatcactatgtaggggatatgggtatatgacggccatacattgccatcatcggcgtgaatgcaattttctggcgtgaatgcaattttctactaagtacttagtactagaacatcgccggggtaggttctacaggtcgatcatacatgtaagcgataaatggtggcgaaattttcgttatctgcaaactacgggcataattttggtcgccccatacggcatacacaccttgatcacccctcatgttctctctgccgaagcttacacgaagtgacttcaccgaggactacacatgaaacatcaccactacagataggatagcctcaagtaaaagagtcccaaaattgattgactcttattgaaacatccttgtgcctgcttttcttctgtcgtgacgctcgaattgcccttcagacgcacgctctgcattccgggtcgcctccaaccaagccgcgtagtcgtccaccagtttgtcacccttcgctctggctcacaagtttcccggggttactcccttcttgtccataatccgatacaagcggggcagtatggattcgagtgcgtcatatactgcattagacagtcttgccttaatctttacgaaggcagccttgacacgctcggcggtctggctggtaaaccccaccttctcttcagcatcttcaggggaacgctctggcaagtcgtttgctggtatgcagtctactcatcactctgatcattctcctactcgtgcccaacagcaatgccgccacttccaagttggccaacgcccctatgctaaagatcaagaatcttggttttgcccctcaagatcgatcgctacctgctgaacacggcgaaaagaagcctgagaggttctggaaatgaagataccgacacatgactgggcgtgtagggggggggggggggggggggaggggcttgagagtcaattcaggaatggctccgctggttgtacaataaccagttgtagtaagtcaatctcgagtgagagtcttcgcgtaagccatcggaaacaggaaagtcccacagattacgtacatctcgaaaggctcacgttggttggtatgcaagcttagctgagattggtaatactgtataccgtctgggcgccgttgtcttcttcttcatttctttcgcaatcgttgacgccctcgtcgttgctgggcgctggtgctgctggcgttgggccttgacgtcggcttgacgtcgctgtcgcgccgtgaagtagatgcggatgtcgttgaagttgatgagcatccgtaagactttcggtcaattgtgactgttgtttgaactggccaagtattttttaaaatacaaatcgcatcatacggttcgggttacggtcagactgaggttctttctttcatgcattcctgttcccagtgcatacgtgtttcatgcacctacggtttttcctagcagttcgtttactgtaagcctattctcaagtactgtatgtagttccgaaattgagaacctcttatgaaacatccacgctctccaacacgttcgaggcgacccgaaatgcaaagcgtgagtcttgagggtgttagcgctggagagtcaattcaggaatggctccgctggttcgtgtggtgcacactgcggatgcagttctgtagtaaatccaaatctcgagcgagaacctccgcgtaagccatccatctacagattacgtttctcgaaaggctcgcagttggttggtagactgtctgaacgctaaagtgggttgctgctaagtcttctccttcgtcttcttcgcattcgttggcgtcctcatcgttgctgggcgccgctgcgagaaggtcatgatcactgtcactgcttgcgcgcttcatggtgctcaggccgcgaaagcagagtgaaggtcgttgaagatcactttaaaaactcgattgtgacgttgattgaactggcctcgtattaatatgtactcaaactcgggaagcaacatacggtttggagttacggtcagatcgtggtccattgctccctgtattcctgttcacagcgcgggagtgtttaatgcacgcgtggttctggaatccgcttgtagcgttcatacatgtattggcggtcatacatgtactggccaacatcaacactcggaattctcaacgtttcatgtttcattttgcaggtgatgtattatatatagagtttagttagctaaaagggattctcaaagttgctggagctataaaagcgggcagatctcactggctgtagccgcagaggcatggatgaatatagtggtctttccgacagataagagaccaggattgtttcatggtcgtctatatagaaataacagcttatcatattctgacttggagtaatttcagccaataaaatcaactaggggtagggaaatcctttctgacacttccctacatatatttgtcggaatcctaggctgaatatgtatataatcatactgaaacccagtacaaaaaatattttcaaaatattttggcgattcagacaactaggcaaattcctactgtaggcataacttattctaggtagcgagacaccggtggacagccaccagtgtcaatattgtataacgaaagtgtcctcgcggccatcatgagcctctctgtgtttgtgcctacaaacacccaaaaggcgcgaacgacggcgattaacgcgttcgagagaatgctagaggtcgagggtgtgagcatggaattgtttcgtgcaagcatacatacagacccctcgggcaaacgcttggctgccacaatggaccgcttcggctattatctcgccactaatgacggtaagaaaggtaagttagctcgtaacacagctacatcgtactatagaaacgtcaagctgtggctatttgatgagtttccacacctgcgtttacccacggagatgaacttgttaaaacaagagaaaactctagataagcactgcttaaaacgtgagaaaggaggactcgttaacagagcgccaccatgtactaaagaggccttaggttctgcaattcgctatgtctacagcacagcacgtgtcaactcggactaccaagatgctgcgctagcctgcctcatgtggcactgcttcggccgctcgtcggacctaggctacctgcgcaagcaacatgtgtcagtgtcagcggacggcggcttctacttgcggctcctccgcgttaaaacggctgaagaacaagggttaacgctcatacctgacaaggaggacttcctgacatgcccgcttcactcgttcgcggtagctctcgtcatacaggccgcgccctgcgcgactctgttaagccagctccctgagcttgttgcgacgagcgaggagccgctagaccctggtgtgccactgcaggccttgctagaagaagagccagctacgctcagggtcgccctgatgccaccctcgcctgatgtcgccgctcccgttcccgcgccaagtcccgtaccaagctgcaactcaagtccccaacctgcaagcacagaagcacaagtgagtagtacatcgaaggccagcgctggggagaagacgcgcgatgaagacggtgttcaggcgtatgtcaaccgcctcctcaagcgcgttgccgagcccggggagccacgaccgacttgacttcccactccttccgacacggcggcgctcagcacgctaacggagacgatcgccttgccgctcagtgaatcttcgaccgcggtgcatgggacatgagcaaggtcaacaaagggttcgcctacgtgtacaacacgccgcgggaagaccggaagattgcgcgagtactgagcggttgggaggccgacgcagctcctgttgtccttgatgctgcggcgctggatcatggagctcaagagcgtctgtcatccttgcgcgaattcctgttcagcacctgtactggactcaagaaacacagcctcaacgtaagcagcaaggtcctcaccgtcctcacggcatacccggtccgctactacccgcagctaaaggcgctggctccggatgccccgattgttgagcgcgtggaagagtgcttggcctccgcggggatctcgacagctgacgtgctcgcattgtcggtggcgctcaacgaacaagcttcacctgctgaacctgttgcagaacaagcacacgaatccaagacgcactcatgccaagtccatcatcaccttctagctgtcattgatgagcttatcgcctcgaaccgagccctctccgcgcgtcttacaatcgtggaggctgcgcaactaaagtgtaagcgaaaacaagtacccgatgaggagccacagacacaaaatacgtcggatcaagagccaaaacccaagcgcagaaagaaagcaacgaccaacctgtccagcgcgtggttcgaatggtacacgcgggtgccacgcgtctgggactccgccgaccgccagaagaagtccgagtttcgccacgtcacggcgttcatgaagctcttcttgagcgaaggcttcacgcttgaccccaaggcgccgcactacaaggatcaagtcctggacgctggccgtcgggctgagaaagccgtgcttgtcttcctgaagtcgcgcaacgtcaacgccaagggagctggaagcgtcttgcgtgcgctgcgcccactccacaagaatggcgtcttggacgagcgcattgccgcatacaagacgctacgcgctgtccgtagaatcgttgatcctgcgcctacagagacacaagccgtcttagccactgtaggtcacgtctaagaaggttagataacaccgctacttcacaaacgcattcatgcaccagcactaccggcacaacacgcacgcacgcctcgccaaccacgcacacaggaggaacagcagccgaggcacgccgcagcagtgaggcacagaagaagggtcacgcaggacgagcagccgtcgcaagcccggtgcggtagcagcacgacgcagcagcagtcggagacacggaacggcagcaccgagtcaccgcacgacgcaaccccaacgccaatcttgatcgataacaccggcctgaattgaacaggcacctcagggccgaagccctgcgctctatccattgagctacagtgttggtgcccaggggagggaggcggggggagggggggggggctgcgactggctgattggctggccggcgatgctgtcgaggctgacggggctgaatcttggtccggaggcttgattccgagctctgaaaaaaaacagactgagggcgcgcgccgtgtgtcggcgactggcagccaccaaattttcgttgggacaggcggcgaatgctgattggctgaaggctgtaccaatcaacactctttattgcttaaagaccctgattggccaatgaattagccaatgatatgccgtggggggatagctaccgccggactgcttctaattgtggcccctctacctgggtgccggcctcactaatgaatttgccggctcctgtgcacattgctccggggcaaaaatgcgccaatacacaaaatgtcgatcttctcgtcccagatgtagtgggcctaccttggctcactactacggcttacacgtatgcgcacgtgtatgaggaagcgtaggtttcttttacttgagtgaagtatactcgagatccacgagtatactttaaacaagataaagactccaagtagcgggttttggtaaaagatgagaactgctaattttgttttatgtttctgacttcctctaaatgtaatattctaagataggaatctgccaacggctggttggcagaattccaatgctatgcatgtcgctcattggctaagagatgctgctctcaggacgagaaagtctttcgaacctctaacagacgtcgtgtctgttagagttacaagtgactgtagccacttgtgcgtgtaaccccgttacaccagaggcctctagaggcgatttcctcgcggctgtgagcaccgcatgaaagctgactggaatcggtcaagtggccccctagacctactctaccgtagacatgatctaatttccgattttacattaattccgattttgccctggctttgacaaacttcctagttgtcggaatatgtagggatgtcggaacggccgcgatatggacgaacacagagtgcacatagaaaaaccaatatgtggtgtgtttgtggttcgaattgccacacactcgccacactttgaaacagattggttggtcatttgtctaaacgggataacgttttgtttgtcatagctacatgcctcgaccgtaaagcctgtttagagtatcaccaacaaaggcaagcacaatcatttttttactgaatgcacgtcccggtgagatccccatcggtgttctaaatgctgaccggtgacgctgtgtttctcaacctaatgcagtctgacaatgttcctcttaatgccttaagtacttcgtacctgtgacaacccgagaacatctccgtctacatcataagtatgcattgaaattggtcacacggccagcgaccaagttaaggtacacggccgtgaccaggtaaagcctgtggataaatcatacaagaaactaaccacagcaatacagtctgcatggccgccttgagtagctgtgtggtgtgaatttgacgtagttgtagagcgacttaagcaaagcaaatctacttcattaatcattgtttttacctattcggaatcgattcagctaatgctaaaagcagggtgagacgagcggagcacttccatgaagagtgttggtcggagcgaattcaaatttgcatttgtagtggtcggaatgggtatttgcttgatgtgcttcattgcgaacagaacaatgaaaattccgcaattgtagtcgtcggtctggtgcaggtcaataattcgctcttgtttgtacgaatcatactcgcttctaaggcccacttttaagtacgatcggcaaatttgatcaagtcgatcgtagtagtactgcaggtggagaggatcaaactgataaatcgttctgcagcgtcggtcgaccagtaccatgcaccagtggaagttatcgaaacaaatcggaagaaccaaaaaccgggagacaccttggaaagatgtagcaaatgcatcatgcaacaacgcgtgctctggtttcgtataaccgaagaaggatgtgtcgataaaacaagtgtctttgcggtatccaagagaaacatggagcgccatcttgatgcacaagtcgttcatccagttgccgtccataaaggcaaacagatcatagaaaaacgcctcctacatgttacaatggcagtttagtatcaacatggacatttaaagttaaaattttgtactcacatgattgccaagcgctaggcggctgaacacggacgttgttcggagtacatccacaaagttttgcacgacttcttgattaatctgaatctcgtcggcatgactttgaaaccaattcaagcatgaggaagctgctgctagatattgaaggcgctggtggaacattcgcattgctgtaatagcggaagagtggaagagtggaagcaatctccagcattcccagccttcacacaaatattatcaatgccttctccatccacatctacgtcatgaaaaatttccccgttgacgtggcttgcatcgcatttctcaatcatcgccgcctccaacataattatgttatcgtaggctgtatccacaatctctttgtcgaatacaaatcgtagattcattggccgtttgccgtgtatactttgcactaaaagcaacgatcgattttttacccaaagttgaaaccatttcaaacgaaaacatttttcgtagagagagatcaatactgaagtagtcgtagcgaaggtcaataatgctggcaagcgaagtaatctcttctgcatgatcgcggtgctgactcaacacgcctgcctcttgatgcgaagcagcgctcaactgtgcattgtcatccacgagattatcactgtcatcttcttcgctgtctccatattcagcggcgctacttgtgcgatccgacttgcctttttgttttttcgattttttcgggtaccacgcacgggttgccttcgtcgaacggactcgccccgacacgtgatcgtttttggtaaatgtgaagtcagcggcgctgaacatactcggagtaagatttaaatctttcttgctcgacacaacaactccatttggcttcaataagtccgacctggcccgctttatacctgaatgttgcacttggggccctgtgacaattgcaccgcgtttcgtgggggtagatgcgcccgaattcatcgtaccgtggggggaggcccttttcaggtggcgtcgctaactgcggtatatgtccatctacaaccaggtcgacaaactgctccaatgtgcgaaaaatactttcgaaatgacgggtgccatgagccaccacagcttccgtaagtcgcgcttgcaatacggacagtctactaaacttttcttgttcaataagagccttttgcctggtgctaatccgcgtgacaaaggggagtcgagcttgaggaacgtcaatggatatcgatgcatcagaccgtaataaccaccgcttatgaatactgtttagcgggatgactctctggtttggcagcgtctagtaacacaacaacttattagctatcgttcaaacgtgaagattgtaaatgtagaggctacctgtcttcttaaatacattgcgtgatagcacggttgtaatcgcgttctcgaaaacaagcaggaacacgtccagctgatggcatcaagtgcgtacttgtattccccggcactatctcgcgacacaaggtaatgacctggacgatcttctatgaaatcgacttgtgtcgaatgctgattgctttgttagatctggttcaaagtgatatggtcgtgtagtaaatatgactcacctttattgcgtgtagatattgctcttgaataagttctgcggcatgctgggacgcaatgcgtagcacgttcaacatttcactgtcgtaagatctgttcacgacagtcccgatgtcctattcaagtacaactttagatgcattcatgatattgttgccataatactaaaggttacttacagccatttgccgggataattctttctctttgagaagctgtatagtgagtaccgtagagatactctcatccagcggcatctgcatgtttaactcaggctttaactttccccagccggactccaagcggttgttagtgtgatttcccaggtgcgggcaatcattgcggtaacaagtcacccagcgtttcttgcattcgtcccaatttgctatgaagtaggcctcaaacgggtgaacgccatcatcacccttcacagtctgtccatcatccttcacagtctgtctttgcacttgtgagttttcggttttgcgtgacgcttgtttagatgaacttgttttttcttcttccgcgaaaatgcggccggccattcgtgctttggaatagctcgaaccatggataacatcgaatcacgagcttcgacgtacgtatcttcatccttggcgtataccatgtcttgaactgctattaagacttcactctgtctttgatgattgaggccgtatttcgcattcgctgcacatacaattattgatatgagccttgaaatgtggcaactacaactactttcacaactactagagctttacgaacctgtaacggtccgaaagtatttgaggacatggaagtggcagattaatacacgagctcgggaaaatttgtcttcgaggaccttgatagtttgtacttcaggtcattcgttttgtgcgtggtatcaaccagcagtatttctggaaaaagatggaacagacgtcgcatacccgaggtctgcagcgttaagcaccgcgcaattccaccgtcatccacgaaaagctgggatgtattgcccgcatcgctctccctgaagtcattcaagatacgggcaactcgaacttcaacagcgtctgccttgtactcttttgtaatctcgtttatcatgttgcgcacatcttgccggatcacgtccttgcctttgaatgtgggaaggttagttttgatcgctgtatggtttcgataatatgtgaagctacagtacctgaggacttgagggcgtactgataaatctgtttaaatggcgatttagcttttaatagctgttgaaccattgacaagacgactgggtctttcacgcgccggttttcagcatacattcgccatatcgtctcgttcacaggatgtgtatgaataggttccgattgattcactcggtagcagtattctcaccttcgagtcatcttgtttaacactttcgtgagagtcacagacaagcttgcttcacatgctgtcccgcgcaagtgcggaacaggtatcgttccttttcccaaagaaaaaaaacttagccacagtatataatcatgcactacaggtaagccttgtatacattggttgaggtccttccacccgtgcgtacagataaacaagacggagtaaaaccgaccaaactcgctgctgtactgcgcgtcttcttgtcttgatttattaaagtactcaatagagactgaactccttttcctgtaaaaagaacattgaataaaggtaagtttgactagacctcacagggaatgataactcaacgtcgcgaacgtacttgtacatctggtaagtactctcacaatactcccctaaagctgcctcgaagtcgtcccaacaaagaaatgttgtgcgctccatccgtcgagacaccgactctccgtgcgtacctgtgcctgttgtatcgtcatgctcatctgtcccacctccgcggattcttgcgccaccctctgctgcaccaccctccgttgcaactaaaccagggcgacgccaactcccggcgccgccaccgccgccaccaccggccgccaggccccgctccatcgatgtcgttgtgtatcagtgtgaactgccaaagctattcctctctcccaaaaataaaccacatgttgatttttgtggggcaactcaccagcaacttaagcaacttcaacgatttaactgcacacggcacgacatacacagcgcgccaagaacgcagcgtaaatcgtacaactacatcgaatagatcatcactggaggtgtaggctccacgcctacacaacttttacccgccactacattcaactgatcgacagccgacaacagtgagtatggcgaaggtggtttcacaatgaaaaataccgtagattggtaacgtctagcttaaaagttgcagtacgctgcaaaacgcgttcacttgctttcacactagtctacggtttatggttccaagagctgatttcgttgggttaagtgccagaaggcgctgcgacagctagattagctaaaaggtcagcacccgccaataggcttagctgatgctcgtgaagatcgacgcccaaacagtagctcccaaagagcatttttaagattcaaaacagttagttaggtacacccacagctgaggatgctttatcgagtggatgagcgtgctcatctgcgcattcgaattcacacccgggtatccgtggccagccgtgttgatgctcttggtcgccttatcggtgagtacgtcaaggaactgctccgcggctccacctctcagttatcatatatgtagcacttctgaactttaacatattacatgtcttctcatgcttatacgtgtcgaagcttcgtgatgccttgacgttgggtgcacgctcaaggatggacgagcgactcaaagcatgatgtctgacccactcctggccacgaccgacacgggtcagatatcgtagagcaatagcattaccgtctcctccccctgttaacgaggctgtcctcaagcgatagaaagcggaagtcgttcgggtcatgcatgtacaggaacgatatcgactatcttgcacgacattggagccgtactagacatgcatcccagtggtttgacgcgtggtgctggtcgcggcaagagcggtgccctgttctagcttagacctctgcctcctacttatcctcctagcgctgcttacggacgtggttatcgacctgacaccaactccagcgacaatagctcgcaatgcagagagatagcagacagggtccgctcggaccaaccaacccgccccccccccccgctgagcagaagtcactcgccttttagacggtgacctcagtcattggcgggatgcatatttcgctggagaggctgaagagcctgacgcagacgccgattaaggaagacgcgacagaggcgatacgcaaagtaggagccccaacctgtagatgaagcgttactatctgcgggacaggtcgttgtagtcgttaggaagaactaatgtacctcaattcaaaacaaacaaaaacaacatccagcggcaatagccaccaggtctcgacactaactctggataggcagttagttgacaataaccaccaaccggttaccacgggttataggtatcaatgggtcagtgtcgacggcgctacaccaccacttgtcatacacgtctcgacgggacgttctagtaaagctgcgctatatcacttgggttctacaagctccgagtatcgcctcactgcatatttaccagcggagacatcagctacgtaagccaccgcaccaaaccgccaacgtctcgttgaaaacagcagccccagatccgttggacgcagcctcaagttcgccgaggcgctgcagtgctgcttcttctcgcgggtaattacgcttaggaaacaagatagccgtaccgtgcgcaatctcctattaatattaccgccatatgaaaactgcaaccacaaatgcaccacatacgaagccacatacgttccacacacgtgtgtggatataatcactccgcagaggcatgactgcgggccataagcttcagtggaccgcggagccattcatctgctttatgaactttataatgaagagatagaaaagagctggataacacatatgagtatgcatatagaccagagatttgacgacgctgtccttgccgcacttggggtatttttaaaataaaaaataaaaaagttttccacataaatgtgctgtgctgtagtattgtgctttgcatccagtttgccctcctatttaatgcactacttagtgttcgtacttagtggtaaatcaaagaggctttgaatgcaagatgctcaagtcgtgtttcgaagccggtttggctccgaaatggcactttctaaaagtgccaaaaggatgctaatccgtactagtactatatgtgctagatcatgcaggagatggcatacagataacgacggaaaaatacgctccaccaaaaaatacgccatgcgacaaatccagatgaccgatccgatacaaatagtctcgtgtatttatagccaatgaggttctcctaaaatccataaaatttgcagaaataatggttggagtagctctgcgagcctataaacacctcatcgatgtgggaatttgcatctaagcatacgtttgtttatacctaaggcactaagttaccatcagactaacgctcggtcaatgttgctattattgtatgccagaattggttctttttaagcatagactagcctgagcactgagaaagcgcacaagaacccgtcaagtatattgatcgttattgcagaatgaaacaataggttttgtttaataaaactgcttctccgcagcttttaaagctgtcgagctacaaacaatatggactttcttttgcgatctctcgtccttctatacataatcggcccttttatagagtgcaaagaatactttcggccaatcagcgtgagtggcgtattttttaataccctccggcttactatggaggatgatggtcagcgctggcgtatttttccgtggtcatctgtaggtgcactactgcgatgtgcctttcccatgcaaaccacatgaatatcccttttgaccaatgatagctctctatttctgcaaaacaggtccattcttcccgacgagcttttcgaggcgttggaatagcttcttcttcttaccagtccgttccagatctactggaggtttgagcacgtttggctcgcaattggttaaaaatagttgtatgcccgtgtgattggtagtaatgcaaccgcctgctcatagcggtttgactggtgtgcagagctccgcacagctcgaaaaattggcgccaggggaagcgcttaagctccaatgatgctttcatcgatgaagaagccaccactgccattaacgatttcgcccccccccccgaccaagcacccacctaccaaacccaacaagctactcgatgtcgcaccccaacaagaccccaagaccaagcacctttcggacgcggaacgtgccctcgtggtgtcggccctcctcaaccgagcgacagtcggcgccctaccgcgtggtgcgctgtctgctgctgcagacacattcgcggtcagcgctcagaccatcagccgtgtctggcgccgggccctgggcaactttcaacgcaccggggtgtacgcatcgcccacaagaatgcgcagcactgggcgcagacgtgtcgaccgctcccgcgagctggagcgcctccgcgcggtcgatccacagcgccggagcaccatccgtgcagccgcccaagcctgtttcctcccaccaactacgctgttccgacaggtgagcatcgggaagctccgtgtggagacgtccgttgccaagcccatgctgtcggacgacaacaagaagtcgaggattgcatttagtgtggggcacgtaagtgcagcaacgcatcatttcagtgacatggaagatgtagtccacgtggatgaaaaactcttctatctctgcaaggtgaaacaccctcgacgacctggtggccaacgtgaaggtggcgctggacgagctgccgccggcaacactggacgcgggcttcttgacgctccaatgcgtgatgaacgattgtgttgctgctggtggtgacaacacattcaagattcgacacatgtcgaagtcgaagcttgcgcgggagggacgacttccacggtgcatcaagtgctctgttactactgcctcatttctgcctccactcgatcgatctgcagattctggccatagtgaaactagtactagtattttcctatagtttaggaacaagctaaatagtggtacatatcaatagatttggaacggactggtagcccttatagcgcaaaaacggctacgaacatgtaggctacatgatgtagcgttactctacaaatcatgctcgagctgcaggggaacaatcaacgcgtcaacaaaatggcaatactggagcactgcctcaccagcatctgggcacactgggcagggaagcccacgccttggctcgtgcgtagagctctgctgagcactagtcgctcatcccacaaccgatcaactcctacttacttaccagcgccgatcaacctgctgcgtcttgctgtctgttgggcgggccttctgggcctcatccaaccgaagagctggactacgacagcgtggtgccgcttcctgagacgaaggcctcgaccaccgaatactcactcgtgctgacgttcaagcccaactcaacatcaacagtgggtgccatccgtacccggccgtcgatgcggacgaaaacaccaaccttggcctctcgctcttcagctgcaaagggtcgtctctcggctcccaagtctacggctgtgtgacggcctacgaggattcgtacgctatcatgtacgcctggtacttcccgagagaccgcaagggcacgttcggccactgccatggctgggagcacgctatcgtgtggcttgcgagaaggggcgccgaagatgcgaacatatcctccgtgtcggcgtcggtctcggacggcaagtacttcacgatcactccccctgacgccgccatggtggaagcgacgagcgtcaagttccagtacaaggcgaagaccttcagccactatgtgaacgtcacgaccgaggccggcgacttccaagacttggtcatgtgggaggacatgccggccgcagctcgcacggcccttaacctcaacgacttcggcagcgccacggtgccgttcaaggaagacacttttcgtgacaacgtggaggaagcctacccgtggtagataggaagcatagttgaagcacaacagaaatgaagaactgagaacatcatcacaaaccgtttacatacaacttgattgacccgaatggagagccacagttcaagtaacgccagattgattcaactgaagccacttcaactggttgcttgcttgagcccatgatgcatcatgcctctgcatagcgcaatgggcgcagcgggtcgcggacccgtgcccgaagttgcgccggccaactcctcgccggtgccgagcagcggcgccgcgcgtggagggtcgccggggccattttcggctccggacgagcccaaaacgggggcgggcggatccccaatgcgtaaccaaagccctagcggatccgccccccgcccggacgtccgccagctcagccgccccagccccgtcgctggccgcgctatagaaagacgcgtcgctggcgaggctggagtggctggccgtggagcactcgctgtcggtggacggcgagcgctcccggggctgccagtccggtcaccagaagcgcatgcgccgatgcggtggtgaagggccgaaaaggtagctggatagaaaagatcaaatgtagttggcctcacgagggatgggtgaaagcccccggagaccgtaccgcgattggctagcaagctaaccgaaagcagcagttccaaaaataaatgtgaaaaagaccccaccaaaagcagggaaaccagttttcacactgattagaacagatactacacttgattttagccaaaggccgagaaggtccacaaccctaaacagtgccagctgttccgttgtgacgtcggataagtgaaacttttaaattgcaaaaagctgcggtggataatgccaaacctatcaatagcattataaaatatagcactagcattacgaaatatagcgatagaattacgaaatatagcactagaattacgaaatatagcgatagaattacgaaatatagcaataacattataaaatatagcaataggctgaaatatgtcaatattaacagttgatgcaaaaataagagtagaggaaacggagaagatcaagtgtagttggcctcgcgggggatgggtgaaagcccccggagaccgtaccgcgattggctagcaagctaaccgaaagcagcagttccaaaaaaaaatgtgaaaaagaccccaccaaaagcagggaaaccagttttcacactgattagaacagaatgtgtgttcgtgtttaccagttagtaacctctccgtaactgaaatgtaggctaaaatatgcatgtcactaaagggagggtgtttgtgtcttcctgggtttttgaagggcggttccctacctgggtagtgccctgttggtcaaatgaccagcttaccgccgtgcccgagcctgcgatgtgcgccgcgggccccccccagacccacgcggcgctcgcgaggcgttgccgctccgttgtccttcgcggtggcgccggcagtaccagccccaggtgcggtggctggcgcggatgcagtggctcgacagctgaaggtccagctgtcgagcctcgcgcttgtgcagcttcaacttttccgtgtaggtgttgaagttgctgggctgcaccgagcccagcgacccgtacacgatcgccgcggtctgcacctgccaccccttgagctgcagctccgccacgatcggttggtacttgagtgtcttgtggtcgtggctgagctgcagcgaggagtggcgggcgccggccgcgtgctcttcgaacgtgaccgccaagtcggcgatcaccatcttcttggcggccacgatccgcagtacgatgtctggccgcagagctgcgcccgtgtactcgggtaccgtctggttcaggcgcagctccgcggtcgacttgccgcgcttgagcgcgttgcggatcttggacccgatctgctccaaggcgtcgtcatgacgctggcggattgcgtccatgttggactcgcaatggttgaggacatgggccagcgtctcggccgaggagcaggtcgggtccctgcaggtcttgtgcgaccgcagccgcttgcgcttgagcacggcgttcgtgtcgatctggttgaggcgggccttcacgccgaagcggtagtcgtcgtccgacaggcccgcccatgtcgacatgaacttggcaccgacaccgccgtgggcccgcaccgtcttgccctggtccgccagacccttccaccgggtctggtggcggatcttgaggtgcaacttgacgtgccgcaacacgctcttgtggtcgagccacttggcgtggtgcggcacgcggaggccgagcgggtccaggccgttgcggtcgtcctgcaccaccaggctgaggtggtagatgcgcagccaccgctgcacgtcggaccacagtgacccgatgtcgccgtggcggcgcagcgcctccgcgtggggcgaggcggcgagctcggagttgaggaagcaccgcacgagctcgtcgtcacgcccccgccagtgttcttcgcggaggcggtgacgcttgcgggccacctggcacacctgtgcgcgcgccacttcccggatcgctgggtccttcgagtgcagcatctgccacgcatgggcgatctgcagcgcgcggtgcatttccaccagcggctggagccccaagcccccgctcgacgttggtgcgtagagcacctcgttggttgccgagcggggcaggcgtagcaggtgccgcaggcccttggctaccacacggtcgaagccctgcagttgggactggagcggtcggaggtggcggagcgcgtactcgaccttggggtagacgtaggtcttgagcgccttcaccacctgccacggcgccaaccccgactgcatcagcgccaccgcctcccgcttgatctgctgtagcttggcctctagctggagacggtggcgcacgtgatcgaaggcgtcgcccacgccgaggtagcggtagctgtcgtgcagcttgatgcttgagacctcctcgtcgtggagcgacagcttcatgtccttgtcgtgggcggggttgccgcgcgcgttgcgtgtcacggccaggaaggcgcacttgcctgggttggcctgcagccccgtccactccaggaactgctcaacgacagcgtggcagcgcgtgatgccggccgcgctgtcgctgaacaccttgaggtcgtcggcgtaggcggtggtgcatggccgcaccccgtccgccaacgcgacgcccactccgtcgagcttctccaatgctcggagcaacggcaccagcgcggcaatgaacaggagggggctgagcggacagccttggtacacgcccacctcctgccgcactggttccgtcgctccgtcggccgcgttgccgacgacgaagtaggagtcctcgtagatgtcgtcgcagcgctcgacgaacgcacgctcgacgccgagcaggcggagcacataccacagcatgtcctggtgaacggacccgaacgcgttccgcaggtcgtaccagacctggtacagcctgcggcgcatgcgtcgggtttggtccaggagcgtggttgccacgaagttgtgctcgtggcaaccattgtacgccctgaaccccttctgcgccatgagcagcagcccgttcgcctccaggtacgccgacagccgacgcgccagcagaccgctgtagagcttgtagatcgcggtctgcaggcagatcggccgccagttcgctgggtcgttggggtcgcccttcttgtggatgaggcggacgaaccccaccttccacagggcaggcacccggtggtggcgccaacaggactggaaggctgcgtggaggagggggaccagctgcgccgcgaacttcttgtagatgtcgtagcccacgccgtcgtggccggggctggagttcgtggccgcttgcatgagctggtcctccacctcgtccatcgtcagctcgtccgtgagcgcgctccgccgctcctgcggtgtcccgacgtcggccatcgcctcgcggaacaacgccccgcaagcttcatctggtaggaagttgatgcggggcgagttcaccgccgtgaagtgctcgtggagcgtgcccgagtcgatggggcacgtctccgggtgctcctccgctgcggtctccgccgacgcagcacgcagaatgtcctcgacgcacttgctctcgttgcgagcgaagtcgtggcggagctgctgttggcgcatcgaggcgcggatccggccgacgcggcgccgcgcacggcggacggccgatctgctggtgggtcgctcctgctgcaccgccgccatctcgtcgagggcctcgtcgagtcgatgctcgcgctgagtgcgcgtcactcggggcggtcgctgtcgctgctgttgcagtggaggccgagggtggggctgggctgctgtgaagggctgcagcacctgccggatgcgactggggatggcgctgatgtatccatcgcccgaggtccagctgtctgcgtcttcgatcttgcacgctagctcctccgccatggcctgcagggccgacgccgccgcttcctgctcgtcttcggtcagctgccgcagtcgaaggcgcggctgccgcgctggagccgtcccgggcccgataggcagcgtggggaacgcctcgccgccgtcgcgcgcggcaatctctgcgtcgatgtcctcgtcatgatcgctggcagactcggcgcgcgtgggtgcgcacgcggggcgggcaggaggtgcgggttgctcgcgctggcgttgtgcagcaggattcatgtggaggcagttctccatcgccccttggtgctcgccgcactcagccagcgaacgcttcaggtccagcgcccggtttgccagtctgtccgcgtgcgcgttcgccttccggtcgatgtgcttgagcgttaaggacgtcacggctcggagggcgtggcggacgcggttgcgcagctggcggaggcgcgggttcctgcaggcgaaggtgcccttgacctgcgctacgacgaggtggctgtcaccttcgatctccaggtgcgaggcgccgtggtggacggcactctgcacgccaagcagcagcgccgtgtattcagcggtgttgttggtctcgctgctgtttggcatgtagtgcgagcacgtccacgccacggtcccgcacggcttgaacaaggcggcaccagctccaccaggtcccgggttccggcggcaggcgccgtcgaagcggagcacccacggctcgggcatagccggccctccgtcgacgtccatcgcatcgggggctgtcgtcgtggccgcggggggagcgggcgggtctgggcagcgccgagccgaagcaggccggcgcgtagctggtgctggtgccgtgggtaggcctgtgagcaggcgagctacagccgctgccccgatcgcgccgtgacgtggaccccaccgtgttgcaccggtaaccggtgcagcggagcccagaggccggtgcgctgccgggttagcagcgtgctcgtcgttcacagcctgggcagtgtcgttcgtgccaggtcttgggccccagcgcgttgctcgtctcgctggaggtggcggcgtcttcgccgtggacgctgccgtcgtcatcgtctccttctccttgatcgctgtcgtctccgtctcctcaggcgctgtcgtcgctgtcgccgttgcagctgtcaccgtcgggggcggtgtcgtcgtctccgtcgcgtccgcggtcgacggcggcggcgccatctcgatgtcaggtgctggctccacctcggcggggtggcgggccagcacgggcggcagcggcgtcgccgtctctgtcgctgtcgtcgccgccttcgaggttgccgtcgtcatcatcgccgtctccgtggttgccggcgttgcctgtgccttggtcgccgacgtcggctgcggtgccggtgccgtctcgacgtccgggtgtggcgtcccgtcggcgggatggcggtccagcatgggcggacccaccgccgtcgtcgtctccgccggtggcggcggcgtcttcccgttcggcggtccctgcagcgtcgcgggcgtccgtgtggagaaggtggcggcgctggcggtcgggttgagtcggcgccgcttgcctgtaacctgctgcaccaggcgagatcgggtgggggtcagcacgggggggacatgctggcgcccaggggtcttgggagcggcgggcacagcgctctgcagggtggcggtgtctgccaccgcagtgccgcgtggtgcggctgctgcagcggcagtccttgctgcggcggggctgctggtgggggtcgcagcagccccgatccgcgtcggggggtcaacaggtgtcgggggtggcaccgctgcctccgaagcttgggccgtcgcgggggtggcggccgcggctggagggttgcgctgggtacacgcttgggtgtggcatgcagccacgatccgcgagaagaagatgagcgagcatcggcacccgctggagaagacgtcctggaagcgggtgccgtggtgtgctgctcggcggtgcgccaccagcgtcgcgaggttcggggcgacgtgcgcgcacaacgcgcactcgaactgggcagcgtcgtgcgcgtacgtcgcctgcaccgtgccctgctggccgtcgtccggtccaaagtgctggggctgggtcctcggtgctgcttgcacggccgcgagtttagccgccgtggcatcgctctcctccgtcttggcctcttggtcacctccgtcgtggccatggttcttgcagcgtctgctccggcggagcgcgtcgcctgtcatgggctccgcgcgcgcgcgtggctgatagtagcgtgctgggttcggcgtagcgcgcgcgcggtgccccacggtggcgcgcacaacaggagctgctgcatcttggacagctgcggctgcggctgttcctacttcggcggcagcggcagccgcagctgggcttggtgttgggggcgcctgggctccaccctcggcgagcatgccgcccgccctgccgggtcggggcaacacactgctggggtcttgggggccgggtcggggcaacacactgctggggtcttgggggccgctgccggcggcggcagggccggcgaggccgtcgtcgtcctcgctgctgtcgtcgtccaggtcgcagggcccgtggcggaccgccagggcccgcgcagtggcggctgtgggcgccgccccaggcgctacccaatcgggcagcctgccggccgccctgccgggtcggccaacatcactggggggcagctggggcgcgaggagaggcggagcggcggcggcggggtcttgggcagccaaacggcgcgcgtgggggtccgtagcaggcgtgggggctgcgcaggagccgtcgcttcgcgcgcctcgccgaagcgccgcatgctcgaggccgtgttcttcggccgtggcgaccgtgccgcgcggcgcacgagaggcccgggatcctggcatagtgaggccaggtggacggggcccggtcccgcccggcggacggtccgcgggcccgcgtccgctcgccgtcgccgcgaagcgacgcgaggttgaagcggcggaccgggcctcgtcttggccgccagagggcccggcccgcggtcccgcaatgggcgcaatgggcgcagcgggtcgcggacccgtgcccgaagttgcgccggccaactcctcgccggtgccgagcagcggcgccgcgcgtggagggtcgccggggccattttcggctccggccgagcccaaaacgggggcgggcggatccccaatgcgtaaccgaagccctagcggatccgcccccgcccggacgtccgccagctcagccgccccagccccatcgctggccgcgctatagaaagacgcgtcgctggcgaggctggagtggctggccgtggagcactcgctgtcggtggacggcgagcgctcccggggctgccagtccggccaccagaagcgcatgcgccgatgcggtggtgaagggccgaaaaggtagctggatagaaaagatcaaatgtagttggcctcacgagggatgggtgaaagcccccggagaccgtaccgcgattggctagcaagctaaccgaaagcagcagttccaaaaataaatgtgaaaaagaccccaccaaaagcagggaaaccagttttcacactgattagaacagatactacacttgatcttagccaaaggccgagaaggtccacaaccctaaacagtgccagctgttccgttgtgacgtcggataagtgaaacttttaaattgcaaaaagctgcggtggataatgccaaacctatcaatagcattataaaatatagcactagcattacgaaatatagcgatagaattacgaaatatagcactagaattacgaaatatagcgatagaattacgaaatatagcaataacattataaaatatagcaataggctgaaatatgtcaatattaacagttgatgcaaaaataagagtaggggaaacggagaagatcaagtgtagttggcctcgcgggggatgggtgaaagcccccggagaccgtaccgcgattggctagcaagctaacctaaagcagtagttccaaaaatgaatgtgaaaaagaccccaccaaaagcagggaaaccagttttcacaccgattagaacagaatgtgtgttcgtgtttaccagttagtaacctctccgtaactgaaatgtaggctaaaatatgcatgtcactaaagggagggtgtttgtgtctttctgccggctgcctgcatcggtggtgggcccggaggcgccggcgcttgagtacactgtgcgtgtcgagctggttcaagcgggcggccaccgcgaagcgatagtcagcttcccacatgcctcgcggccgcgtgaggaagctgctgccgacgccgccgtgcgcgcgtgccgttctgccttggtcgcgcatggccgcccacttggtccagtgtctgtgcttgatgtgcagcttcacgtgccgcaggaccgtgcggtggtcgagccacttgtcgtggtgcggcacgcgaagctgcagcgtggccgcggccgtgccggtgtcggtgcacgccggcgcggtcgcgaactggaggccgatcgtgcggaggtggcgctggacgtcgacccagagcgagccgatgtcgccgttgcggcgcttcggcggcgcgttgggcgacgtcccgagctgcgagttgagcagcagctcgcacagctcctcctcgcggcccgcccacgcttgagtgtccagccggtggcgcgcgtcggcgatctgccggggctgcacgcgcgcgatgcgctggatggcagggtccttggagttcagcatctaccacccatgcgcgacttgcagcgccgcgtgcagttccgtcagcggcagtaagcccagtccgccgcgcgacaccggtgcgtagaagcactgcgctgtggcggaggctggcagtcgcaggagatggcggaggcctcgcgcgaggtgccggtcgaagcccgcaagctgctgctggaaggggcggaggtggcgaagcgcgtactccacccgagggtagaggtacgtcttcaccgccttcaccacctgccacggtgcgaggcccgactggagcagcgctgtcgcgtcatccttcagctgtttgagcataggcgcgagctcgacgcggcggcgcgtgtggtcgaagccgtcgccgacccccaggtaggtgtacgaggcgctcatggacagcgcggggatcggcgacccgtccagctccagcttgaggtcgtccgccttgagcacgccgcggcggtcgcgctggatcgacatggtggagcacttgctggggttggccgccatgccggtccagcggaggaagtcggccacgagcgcgtgctgtcgcttgatgccgtcctcggtgccgctgaagatcttgaggtcgtcggcgtatgccgaggcaccggggaagtcatcgcccgacagcggcgcgcccgtggccggcaatcgcttcagcgcgaagagcagcgggctgatgtcagcgttgaagagctgtgggctgagcgggcagccttggaagactcccacccgcagcgagatcggggccgttgtgccgtcggcggcgttcccgacgacgaacgccgcgctctcgtagagccccttgcacatggtgacgtagtcctcggggacgccgagccgcgcgagtgcatcccatagcagcgcgaacggcacgctgccgaacgcgttgcggaagtcgtaccagacttcgtagagctgtcggcgcttgcggcgggcctggtcgacgagcgtggccgcgaggaagttgtgctccccgcagccgttgaccgctcggaagcccttctgccccggggcgtggcggtcgttcgcgtccagccaccgtaccagccgccgcgcgaggacccccgtgtagagcttgtagatggcttgctggaggcaaatgggcctccagttcgccgggtcctcgcgcgcgcccttcttgtgcagcagccgcaccaccccgagcttccagctctggggcacacgtttcgcctcccagcacttctggaaggcggtggcgagcacgggcaggagctgcgcggcgaagtgctggtacacgtcatagccgacgccgtcgaggccggggctggaggtgccgtgggcgtgctgcagctgtgactcgatatcgtcctgtgtcggtgcctccgtgagcagctccctgaacctcgacgcggcaggcaggtgggtcatagcggagcggaaggcagcacccgccggggcgtcaggagcgaactcctggctgggtgtgttgacgccgtcgaagtaccgccagagctcatcgcccggaatggggcaggtaccgtcgtctgtagcgcctgccgctggcgccgctgggtccgatgcggtgccggcgctggaggccgctgtccttggtgtctcctgctgcgcgcgtgccttggccaggatgtcttcgacgcaggctttctcgtccgtgtcgaaccggtgacgcaggtgccgttggtcgatggccgagttgacgcggccgacgcggcggcgggctcggcgaacagcagtgcggtctctgggcgaagcctgctccacggcgtggaggtcgtccaaggcctcgtcgaggcggtgctcgcggtggtgtcgagtcacccgcggcgggcggtggcgacgtcgccgcttcgctgcaccagagcgcccgcggcgcctgcgctgcctccgtcgcgctgggtcctgctgactggcgtcgccatcgcgctcgttgtctccatgtgcatcgccttccaggctgcggcggtcctgcccttggtcgtgcagcgggcgctgccgtcgctggtcgccttgttgccgctgctgccgcgggcactggctgccttggtgctgctgtcgctgacgctggggacgcggctcggggcgtcgctgggcctgggagtacggctgcaatttgtcgtacaggaggtgcgggagggctgtgatgtagccctccgccgactcccagtcactggcgtcagtgatcttggccgccagcgtcgcgccaagccgctccaccatctcgcgggcagcgtcgtcctcagcttcggtgagctggcgtagtcggaggcggggtcgatgctgcggaactgcgtccggcccgatgcgcatggctgcatagacctcgccgtcgtcgatgtcggcgagatcctcgtcctccggctcctgcatctcggtgttggtgtcggccgcgggtgtcggaggcggagtgcggggtgtcggctggggcggcagcacgggcatagggtccagcgtcgtgttcgtacagccgtcgcctgccgtgtgagcgccgcactccatcaccgtccggcggaggtcgagggctcggttggccaggcggtcggcatgggcattcgcttggcggtcgatgtggtggagtgagaagctccccacccgcgcgagctccaccttgacttggtcgcggaggcggcgtagaacggcgttcctcgccgcgaagatgccgcgcacctgctggatcacaagggtgctgtcgccttccaccctcagcgacgtcgctccgtggtcggcagcggctctcgacccgagcagcagcgccgagtactcggcagtgttgttcgtttcactgctgctcggcatgtagtgggagcacgtccacaccacggagccgtcgggcttgaacagcgctgcaccagctccgccgggtcctgggttggcgcggcaggcgccgtcgaagcgcagcagccactctccggcggcgccgctgtccacgtccatcgccgccgctgtcgccgtccggtcgggtgcggccgccgggttgtcctcctggtttgcgtccctggccgtcaggtcggctccgtccgccgaggtgtcctccttggtctcgccgtcagccgtcggctctggtgggagcaggcgagcggcgatccgagacgccaccatgcggcgcggcagcggtgggccccagcgaggcgctggaacctcaccgagacgcgcagctatgcgggtggccaccagctctcggggcagcggaggttcccagcgtggtgctggaatggcaccaaggcgcgcggcgacacgttcagcgaccagagctcggggtagcgctggcccccatcgtccagggcctggctgctcctgcacttcaacaacttcaacttcgggatgagtggggctcgcaagcgggggggacgctgcgagctccggggttgctggttggggcgagtcgggcgtgacagtggccgccgcgacggtggcgtcggctgcggcagcggtggggcttgatgtccctgccactggcggagccgtagccggaagtgcagtcgaacggccggcgcacgcttgcgcgtgtttagccgccgctggccgcgacgcaaagggggtgccgcacgcgcagcccgccagaaacttgtcctggaagactgcgcgccggtgccgagtggtccgatgcctctgcaaggagctgaagctggctgccgtgaacgtgcacagcgtgcacgtgaagcgctccgcgttgtgcacatacacggcgaggacaggggccgagagagcgctggccgcgtatggcttgtgcgcttggggtgggtcctcgactccgtcctcgtccgcgagctgcaggtgctcggccggcttctgggcgtcggcgtcgtcttcgctgttgaggcggcggcgcttgccgtccgggcgtcgctcgctgggccggcgaggcgatgggcggcgctgcctgggccggacgcggccttggtcaacgtccatgggctctgcgggggaaggcgccgcctgcgaggcgcgctgtgcgcaggcgagggcatggctcgtcgccgccatccgcgagtggaacacgaggctgcacgcgcacccgttgtcgaagatatcggagaagcgggtgccgcggtgcgccgatctgcggtgggcgacgagcgtagccaagttgcctgcgacgtacgcacacacgctgcacttgaactcggtggcgctgtgcgcgtacgtcgcctgcaccgtgccctgctggccgtcgtccggtccaaagtgttggggctgggtccttggtgctgcttgcacggccgcgagtttagccgccgtggcatcgctctcctccgtcttggcctcttggnnnnnnnnnnnnnnnnnnnnnnnnnnnnnnnnnnnnnnnnnnnnnnnnnnnnnnnnnnnnnnnnnnnnnnnnnnnnnnnnnnnnnnnnnnnnnnnnnnnnnnnnnnnnnnnnnnnnnnnnnnnnnnnnnnnnnnnnnnnnnnnnnnnnnnnnnnnnnnnnnnnnnnnnnnnnnnnnnnnnnnnnnnnnnnnnnnnnnnnnnnnnnnnnnnnnnnnnnnnnnnnnnnnnnnnnnnnnnnnnnnnnnnnnnnnnnnnnnnnnnnnnnnnnnnnnnnnnnnnnnnnnnnnnnnnnnnnnnnnnnnnnnnnnnnnnnnnnnnnnnnnnnnnnnnnnnnnnnnnnnnnnnnnnnnnnnnnnnnnnnnnnnnnnnnnnnnnnnnnnnnnnnnnnnnnnnnnnnnnnnnnnnnnnnnnnnnnnnnnnnnnnnnnnnnnnnnnnnnnnnnnnnnnnnnnnnnnnnnnnnnnnnnnnnnnnnnnnnnnnnnnnnnnnnnnnnnnnnnnnnnnnnnnnnnnnnnnnnnnnnnnnnnnnnnnnnnnnnnnnnnnnnnnnnnnnnnnnnnnnnnnnnnnnnnnnnnnnnnnnnnnnnnnnnnnnnnnnnnnnnnnnnnnnnnnnnnnnnnnnnnnnnnnnnnnnnnnnnnnnnnnnnnnnnnnnnnnnnnnnnnnnnnnnnnnnnnnnnnnnnnnnnnnnnnnnnnnnnnnnnnnnnnnnnnnnnnnnnnnnnnnnnnnnnnnnnnnnnnnnnnnnnnnnnnnnnnnnnnnnnnnnnnnnnnnnnnnnnnnnnnnnnnnnnnnnnnnnnnnnnnnnnnnnnnnnnnnnnnnnnnnnnnnnnnnnnnnnnnnnnnnnnnnnnnnnnnnnnnnnnnnnnnnnnnnnnnnnnnnnnnnnnnnnnnnnnnnnnnnnnnnnnnnnnnnnnnnnnnnnnnnnnnnnnnnnnnnnnnnnnnnnnnnnnnnnnnnnnnnnnnnnnnnnnnnnnnnnnnnnnnnnnnnnnnnnnnnnnnnnnnnnnnnnnnnnnnnnnnnnnnnnnnnnnnnnnnnnnnnnnnnnnnnnnnnnnnnnnnnnnnnnnnnnnnnnnnnnnnnnnnnnnnnnnnnnnnnnnnnnnnnnnnnnnnnnnnnnnnnnnnnnnnnnnnnnnnnnnnnnnnnnnnnnnnnnnnnnnnnnnnnnnnnnnnnnnnnnnnnnnnnnnnnnnnnnnnnnnnnnnnnnnnnnnnnnnnnnnnnnnnnnnnnnnnnnnnnnnnnnnnnnnnnnnnnnnnnnnnnnnnnnnnnnnnnnnnnnnnnnnnnnnnnnnnnnnnnnnnnnnnnnnnnnnnnnnnnnnnnnnnnnnnnnnnnnnnnnnnnnnnnnnnnnnnnnnnnnnnnnnnnnnnnnnnnnnnnnnnnnnnnnnnnnnnnnnnnnnnnnnnnnnnnnnnnnnnnnnnnnnnnnnnnnnnnnnnnnnnnnnnnnnnnnnnnnnnnnnnnnnnnnnnnnnnnnnnnnnnnnnnnnnnnnnnnnnnnnnnnnnnnnnnnnnnnnnnnnnnnnnnnnnnnnnnnnnnnnnnnnnnnnnnnnnnnnnnnnnnnnnnnnnnnnnnnnnnnnnnnnnnnnnnnnnnnnnnnnnnnnnnnnnnnnnnnnnnnnnnnnnnnnnnnnnnnnnnnnnnnnnnnnnnnnnnnnnnnnnnnnnnnnnnnnnnnnnnnnnnnnnnnnnnnnnnnnnnnnnnnnnnnnnnnnnnnnnnnnnnnnnnnnnnnnnnnnnnnnnnnnnnnnnnnnnnnnnnnnnnnnnnnnnnnnnnnnnnnnnnnnnnnnnnnnnnnnnnnnnnnnnnnnnnnnnnnnnnnnnnnnnnnnnnnnnnnnnnnnnnnnnnnnnnnnnnnnnnnnnnnnnnnnnnnnnnnnnnnnnnnnnnnnnnnnnnnnnnnnnnnnnnnnnnnnnnnnnnnnnnnnnnnnnnnnnnnnnnnnnnnnnnnnnnnnnnnnnnnnnnnnnnnnnnnnnnnnnnnnnnnnnnnnnnnnnnnnnnnnnnnnnnnnnnnnnnnnnnnnnnnnnnnnnnnnnnnnnnnnnnnnnnnnnnnnnnnnnnnnnnnnnnnnnnnnnnnnnnnnnnnnnnnnnnnnnnnnnnnnnnnnnnnnnnnnnnnnnnnnnnnnnnnnnnnnnnnnnnnnnnnnnnnnnnnnnnnnnnnnnnnnnnnnnnnnnnnnnnnnnnnnnnnnnnnnnnnnnnnnnnnnnnnnnnnnnnnnnnnnnnnnnnnnnnnnnnnnnnnnnnnnnnnnnnnnnnnnnnnnnnnnnnnnnnnnnnnnnnnnnnnnnnnnnnnnnnnnnnnnnnnnnnnnnnnnnnnnnnnnnnnnnnnnnnnnnnnnnnnnnnnnnnnnnnnnnnnnnnnnnnnnnnnnnnnnnnnnnnnnnnnnnnnnnnnnnnnnnnnnnnnnnnnnnnnnnnnnnnnnnnnnnnnnnnnnnnnnnnnnnnnnnnnnnnnnnnnnnnnnnnnnnnnnnnnnnnnnnnnnnnnnnnnnnnnnnnnnnnnnnnnnnnnnnnnnnnnnnnnnnnnnnnnnnnnnnnnnnnnnnnnnnnnnnnnnnnnnnnnnnnnnnnnnnnnnnnnnnnnnnnnnnnnnnnnnnnnnnnnnnnnnnnnnnnnnnnnnnnnnnnnnnnnnnnnnnnnnnnnnnnnnnnnnnnnnnnnnnnnnnnnnnnnnnnnnnnnnnnnnnnnnnnnnnnnnnnnnnnnnnnnnnnnnnnnnnnnnnnnnnnnnnnnnnnnnnnnnnnnnnnnnnnnnnnnnnnnnnnnnnnnnnnnnnnnnnnnnnnnnnnnnnnnnnnnnnnnnnnnnnnnnnnnnnnnnnnnnnnnnnnnnnnnnnnnnnnnnnnnnnnnnnnnnnnnnnnnnnnnnnnnnnnnnnnnnnnnnnnnnnnnnnnnnnnnnnnnnnnnnnnnnnnnnnnnnnnnnnnnnnnnnnnnnnnnnnnnnnnnnnnnnnnnnnnnnnnnnnnnnnnnnnnnnnnnnnnnnnnnnnnnnnnnnnnnnnnnnnnnnnnnnnnnnnnnnnnnnnnnnnnnnnnnnnnnnnnnnnnnnnnnnnnnnnnnnnnnnnnnnnnnnnnnnnnnnnnnnnnnnnnnnnnnnnnnnnnnnnnnnnnnnnnnnnnnnnnnnnnnnnnnnnnnnnnnnnnnnnnnnnnnnnnnnnnnnnnnnnnnnnnnnnnnnnnnnnnnnnnnnnnnnnnnnnnnnnnnnnnnnnnnnnnnnnnnnnnnnnnnnnnnnnnnnnnnnnnnnnnnnnnnnnnnnnnnnnnnnnnnnnnnnnnnnnnnnnnnnnnnnnnnnnnnnnnnnnnnnnnnnnnnnnnnnnnnnnnnnnnnnnnnnnnnnnnnnnnnnnnnnnnnnnnnnnnnnnnnnnnnnnnnnnnnnnnnnnnnnnnnnnnnnnnnnnnnnnnnnnnnnnnnnnnnnnnnnnnnnnnnnnnnnnnnnnnnnnnnnnnnnnnnnnnnnnnnnnnnnnnnnnnnnnnnnnnnnnnnnnnnnnnnnnnnnnnnnnnnnnnnnnnnnnnnnnnnnnnnnnnnnnnnnnnnnnnnnnnnnnnnnnnnnnnnnnnnnnnnnnnnnnnnnnnnnnnnnnnnnnnnnnnnnnnnnnnnnnnnnnnnnnnnnnnnnnnnnnnnnnnnnnnnnnnnnnnnnnnnnnnnnnnnnnnnnnnnnnnnnnnnnnnnnnnnnnnnnnnnnnnnnnnnnnnnnnnnnnnnnnnnnnnnnnnnnnnnnnnnnnnnnnnnnnnnnnnnnnnnnnnnnnnnnnnnnnnnnnnnnnnnnnnnnnnnnnnnnnnnnnnnnnnnnnnnnnnnnnnnnnnnnnnnnnnnnnnnnnnnnnnnnnnnnnnnnnnnnnnnnnnnnnnnnnnnnnnnnnnnnnnnnnnnnnnnnnnnnnnnnnnnnnnnnnnnnnnnnnnnnnnnnnnnnnnnnnnnnnnnnnnnnnnnnnnnnnnnnnnnnnnnnnnnnnnnnnnnnnnnnnnnnnnnnnnnnnnnnnnnnnnnnnnnnnnnnnnnnnnnnnnnnnnnnnnnnnnnnnnnnnnnnnnnnnnnnnnnnnnnnnnnnnnnnnnnnnnnnnnnnnnnnnnnnnnnnnnnnnnnnnnnnnnnnnnnnnnnnnnnnnnnnnnnnnnnnnnnnnnnnnnnnnnnnnnnnnnnnnnnnnnnnnnnnnnnnnnnnnnnnnnnnnnnnnnnnnnnnnnnnnnnnnnnnnnnnnnnnnnnnnnnnnnnnnnnnnnnnnnnnnnnnnnnnnnnnnnnnnnnnnnnnnnnnnnnnnnnnnnnnnnnnnnnnnnnnnnnnnnnnnnnnnnnnnnnnnnnnnnnnnnnnnnnnnnnnnnnnnnnnnnnnnnnnnnnnnnnnnnnnnnnnnnnnnnnnnnnnnnnnnnnnnnnnnnnnnnnnnnnnnnnnnnnnnnnnnnnnnnnnnnnnnnnnnnnnnnnnnnnnnnnnnnnnnnnnnnnnnnnnnnnnnnnnnnnnnnnnnnnnnnnnnnnnnnnnnnnnnnnnnnnnnnnnnnnnnnnnnnnnnnnnnnnnnnnnnnnnnnnnnnnnnnnnnnnnnnnnnnnnnnnnnnnnnnnnnnnnnnnnnnnnnnnnnnnnnnnnnnnnnnnnnnnnnnnnnnnnnnnnnnnnnnnnnnnnnnnnnnnnnnnnnnnnnnnnnnnnnnnnnnnnnnnnnnnnnnnnnnnnnnnnnnnnnnnnnnnnnnnnnnnnnnnnnnnnnnnnnnnnnnnnnnnnnnnnnnnnnnnnnnnnnnnnnnnnnnnnnnnnnnnnnnnnnnnnnnnnnnnnnnnnnnnnnnnnnnnnnnnnnnnnnnnnnnnnnnnnnnnnnnnnnnnnnnnnnnnnnnnnnnnnnnnnnnnnnnnnnnnnnnnnnnnnnnnnnnnnnnnnnnnnnnnnnnnnnnnnnnnnnnnnnnnnnnnnnnnnnnnnnnnnnnnnnnnnnnnnnnnnnnnnnnnnnnnnnnnnnnnnnnnnnnnnnnnnnnnnnnnnnnnnnnnnnnnnnnnnnnnnnnnnnnnnnnnnnnnnnnnnnnnnnnnnnnnnnnnnnnnnnnnnnnnnnnnnnnnnnnnnnnnnnnnnnnnnnnnnnnnnnnnnnnnnnnnnnnnnnnnnnnnnnnnnnnnnnnnnnnnnnnnnnnnnnnnnnnnnnnnnnnnnnnnnnnnnnnnnnnnnnnnnnnnnnnnnnnnnnnnnnnnnnnnnnnnnnnnnnnnnnnnnnnnnnnnnnnnnnnnnnnnnnnnnnnnnnnnnnnnnnnnnnnnnnnnnnnnnnnnnnnnnnnnnnnnnnnnnnnnnnnnnnnnnnnnnnnnnnnnnnnnnnnnnnnnnnnnnnnnnnnnnnnnnnnnnnnnnnnnnnnnnnnnnnnnnnnnnnnnnnnnnnnnnnnnnnnnnnnnnnnnnnnnnnnnnnnnnnnnnnnnnnnnnnnnnnnnnnnnnnnnnnnnnnnnnnnnnnnnnnnnnnnnnnnnnnnnnnnnnnnnnnnnnnnnnnnnnnnnnnnnnnnnnnnnnnnnnnnnnnnnnnnnnnnnnnnnnnnnnnnnnnnnnnnnnnnnnnnnnnnnnnnnnnnnnnnnnnnnnnnnnnnnnnnnnnnnnnnnnnnnnnnnnnnnnnnnnnnnnnnnnnnnnnnnnnnnnnnnnnnnnnnnnnnnnnnnnnnnnnnnnnnnnnnnnnnnnnnnnnnnnnnnnnnnnnnnnnnnnnnnnnnnnnnnnnnnnnnnnnnnnnnnnnnnnnnnnnnnnnnnnnnnnnnnnnnnnnnnnnnnnnnnnnnnnnnnnnnnnnnnnnnnnnnnnnnnnnnnnnnnnnnnnnnnnnnnnnnnnnnnnnnnnnnnnnnnnnnnnnnnnnnnnnnnnnnnnnnnnnnnnnnnnnnnnnnnnnnnnnnnnnnnnnnnnnnnnnnnnnnnnnnnnnnnnnnnnnnnnnnnnnnnnnnnnnnnnnnnnnnnnnnnnnnnnnnnnnnnnnnnnnnnnnnnnnnnnnnnnnnnnnnnnnnnnnnnnnnnnnnnnnnnnnnnnnnnnnnnnnnnnnnnnnnnnnnnnnnnnnnnnnnnnnnnnnnnnnnnnnnnnnnnnnnnnnnnnnnnnnnnnnnnnnnnnnnnnnnnnnnnnnnnnnnnnnnnnnnnnnnnnnnnnnnnnnnnnnnnnnnnnnnnnnnnnnnnnnnnnnnnnnnnnnnnnnnnnnnnnnnnnnnnnnnnnnnnnnnnnnnnnnnnnnnnnnnnnnnnnnnnnnnnnnnnnnnnnnnnnnnnnnnnnnnnnnnnnnnnnnnnnnnnnnnnnnnnnnnnnnnnnnnnnnnnnnnnnnnnnnnnnnnnnnnnnnnnnnnnnnnnnnnnnnnnnnnnnnnnnnnnnnnnnnnnnnnnnnnnnnnnnnnnnnnnnnnnnnnnnnnnnnnnnnnnnnnnnnnnnnnnnnnnnnnnnnnnnnnnnnnnnnnnnnnnnnnnnnnnnnnnnnnnnnnnnnnnnnnnnnnnnnnnnnnnnnnnnnnnnnnnnnnnnnnnnnnnnnnnnnnnnnnnnnnnnnnnnnnnnnnnnnnnnnnnnnctccccacccgcgcgagctctaccttgacttggtcgcggaggcggcgtagaatggcgttcctcgccgcgaagatgccgcgcacctgctggatcacaagggtgctgtcgccttccacccgcagcgacgtcgctccgtggtcggcagcggctctcgacccgagcagcagcgccgagtactcggcagtgttgttcgtttcgctgctgctcggcatgtagtgggagcacgtccacaccacggagccgtcgggcttgaacagcgctgcaccagctccgccgggtcctgggttggcgcggcaggcgccgtcgaagcgcagcagccactctccggcggtgccgctgtccacgtccatcgccgccgctgtcgccgtccggtcgggtgcggccgccgggttgtcctcctggtttgcgtccctggccgtcaggtcggctccgtccgccgaggtgtcctccttggtctcgccggcagccgtcggctctggtgggagcaggcgggcggcgatccgagacgccaccacgcggcgtggcagcggtgggccccagcgaggcgctggaacctcaccgagacgcgcagcgatgcgggtggccaccagctctcggggcagcggaggttcccagcgtggtgctggaatggcaccaaggcgcgcggcgacacgttcagcgaccagagctcggggtagcgctggcccccatcgtccatggctcggctgctcctgcacttcaacaacttcaacttcgggatgagtggggctcgcaagcgggggggacgctgcgagctccggggttgctggttggggcgagtcgggcgtgacagtggccgccgcgacggtggcgttggctgcggcagcggtggggcttgatgtccctgccactggcggagccgtagccggaggtgcagtcgaacggccggcgcacgcttgcgcgtgtttagctgccgctggccgcgacgcaaagggggtgccgcacgcgcagcccgccagaaacttgtcctggaaggctgcgcgccggtgccgagtggtccgatgcctctgcagggagctgaagctggctgccgtgaacgtgcacagcgtgcacgtgaagcgctccgcgttgtgcacgtacacggcgaggacgggagcttggcgggcgcttgctgctggtggcgtgtgcaccggggtttggttctcggctccgtcctcgtccacgagctgcaggtgctcggccggcttctgggcgtcggcgtcgtcgtcgctgttgaggcggcggcgcttgccgtccgggcgtcgctcgctgggccggcgaggcgatgggcggcgctgcctgggccggacgcggccttggtcaacgtccatgggctctgcgggggaaggcgccgcctgcgaggcgcgctgtgcgcaggcgagggcatggctcgtcgccgccatccgcgagtggaacacgaggctgcacgcgcacccgctgtcgaagatgtcggagaagcgggtgccgcggtgcgccgatctgcggtgggcgacgagcgtagccaagttgcctgcgacgtacgcacacacgctgcacttgaactcggtggcgctgtgtgcgtacgtcgtccgcaccggctcctgcgcggcgacttggtcggcagcccgagccgcagcgtcagttgcaactgccgcctcagcaatagctgcagcagtcgcagccggcgcggctccaggcgttggcatgtcggcgagcatgccgcccgccctgccgggccggggcaacacactcgcagggtccgggcggggcttggcggcggcggcggggtcgtcttggccgtccgcgtcgtcgccgtcgtcgtcctgggcgcggcggaggtcgtcggggccctggctgcccgtgggagcgtgcgccgtggcggctgcgggtgctctaccgacgggcagcctgccggccgccctgccgggtcggccagcatcatcggcggggtcttgggggctgctggcggcggcgtcgtggccgtccgaggcttcgtcgtcctcgctgctgtcgtcgtccaggtcgcagggcccgtggcggaccgccagggcccgcgcagtggcggctgtgagcgccgccccaggcgctacccaatcgggcagcctgccggccgccctgccgggtcggccaacatcactggggggcagctggggcgcgaggagaggcggagcggcggcggcggggtcttgggcagccaaacggcgcgcgtgggggtccgtagcaggcgtgggggctgcgcaggagccgtcgctccgcgcgcctcgcagaagcgccgcatgctcgaggccgtgttcttcggccgtggcgaccgtgccgcgcggcgcacgagaggcccgggatcctggcatagtgaggccaggtggacggggcccggtcccgcccggcggacggtccgcgggcccgcgtccgctcgccgtcgccgcgaagcgacgcgaggttgaagcggcggaccgggcctcggcttggccgccagagggcccggcccgcggtcccgcaatgggcgcaatgggcgcagcgggtcgcggacccgtgcccgaagttgcgccggccaactcctcgccggtgccgagcagcggcgccgcgcgtggagggtcgccggggccattttcggctccggccgagcccaaaacgggggcgggcggatccccaatgcgtaaccgaagccctagcggatccgcccccgcccggacgtccgccagctcagccgccccagccccgtcgctggccgcgctatagaaagacgcgtcgctggcgaggctggagtggctggccgtggagcactcgctgtcggtggacggcgagcgctcccggggctgccagtccggccaccagaagcgcatgcgccgatgcggtggtgaagggccgaaaaggtagttggatagaaaagattaagtagtagttggcctcacgagggataggtgaaagcccccggagaccgtaccgcgattggctagcaagctaaccgaaagcagcagttccaaaaataaatgtgaaaaagaccccaccaaaagcagggaaaccagttttcacactgattagaacagaaagggttaatgtattacctgccggttagtccgttgcgtcctggtagtgactacctgggagtccctaattggtgtgtagttgtgtgtacgggttgaaccaatcggggggtcggaccatgtgagccggtgcagggtttccgagggcggttccctacatgggtgtggccctgtcggccgcaatgggcctggttgccgtctagcggcggccggagcgcgacggagtccccccggtctccgtcacccgactgcccctggtgtcttggctggggcgctgtgcgtgctggcgggcgcggtgctggctgcaatgcaggttccagatgcggcggctggactgtatgcacgcggcagatagctgccagtccagccgcttcgcatctcgcttgagcagccccaggtgctcggtgtaaaccgagcggttgccaccggcgaccgcaccaagcgagccgtaaacgagcgccgagaggtgcaccttccacccttggcgctcgaggtggcgcttgatgcggtcgtacttggcgcgcttgtgtgcggcgatgcgggccagcgctgagctgtccgggtcctcgcccgcctgctcctcgaacgccacggccaggtcgnnnnnnnnnnnnnnnnnnnnnnnnnnnnnnnnnnnnnnnnnnnnnnnnnnnnnnnnnnnnnnnnnnnnnnnnnnnnnnnnnnnnnnnnnnnnnnnnnnnnnnnnnnnnnnnnnnnnnnnnnnnnnnnnnnnnnnnnnnnnnnnnnnnnnnnnnnnnnnnnnnnnnnnnnnnnnnnnnnnnnnnnnnnnnnnnnnnnnnnnnnnnnnnnnnnnnnnnnnnnnnnnnnnnnnnnnnnnnnnnnnnnnnnnnnnnnnnnnnnnnnnnnnnnnnnnnnnnnnnnnnnnnnnnnnnnnnnnnnnnnnnnnnnnnnnnnnnnnnnnnnnnnnnnnnnnnnnnnnnnnnnnnnnnnnnnnnnnnnnnnnnnnnnnnnnnnnnnnnnnnnnnnnnnnnnnnnnnnnnnnnnnnnnnnnnnnnnnnnnnnnnnnnnnnnnnnnnnnnnnnnnnnnnnnnnnnnnnnnnnnnnnnnnnnnnnnnnnnnnnnnnnnnnnnnnnnnnnnnnnnnnnnnnnnnnnnnnnnnnnnnnnnnnnnnnnnnnnnnnnnnnnnnnnnnnnnnnnnnnnnnnnnnnnnnnnnnnnnnnnnnnnnnnnnnnnnnnnnnnnnnnnnnnnnnnnnnnnnnnnnnnnnnnnnnnnnnnnnnnnnnnnnnnnnnnnnnnnnnnnnnnnnnnnnnnnnnnnnnnnnnnnnnnnnnnnnnnnnnnnnnnnnnnnnnnnnnnnnnnnnnnnnnnnnnnnnnnnnnnnnnnnnnnnnnnnnnnnnnnnnnnnnnnnnnnnnnnnnnnnnnnnnnnnnnnnnnnnnnnnnnnnnnnnnnnnnnnnnnnnnnnnnnnnnnnnnnnnnnnnnnnnnnnnnnnnnnnnnnnnnnnnnnnnnnnnnnnnnnnnnnnnnnnnnnnnnnnnnnnnnnnnnnnnnnnnnnnnnnnnnnnnnnnnnnnnnnnnnnnnnnnnnnnnnnnnnnnnnnnnnnnnnnnnnnnnnnnnnnnnnnnnnnnnnnnnnnnnnnnnnnnnnnnnnnnnnnnnnnnnnnnnnnnnnnnnnnnnnnnnnnnnnnnnnnnnnnnnnnnnnnnnnnnnnnnnnnnnnnnnnnnnnnnnnnnnnnnnnnnnnnnnnnnnnnnnnnnnnnnnnnnnnnnnnnnnnnnnnnnnnnnnnnnnnnnnnnnnnnnnnnnnnnnnnnnnnnnnnnnnnnnnnnnnnnnnnnnnnnnnnnnnnnnnnnnnnnnnnnnnnnnnnnnnnnnnnnnnnnnnnnnnnnnnnnnnnnnnnnnnnnnnnnnnnnnnnnnnnnnnnnnnnnnnnnnnnnnnnnnnnnnnnnnnnnnnnnnnnnnnnnnnnnnnnnnnnnnnnnnnnnnnnnnnnnnnnnnnnnnnnnnnnnnnnnnnnnnnnnnnnnnnnnnnnnnnnnnnnnnnnnnnnnnnnnnnnnnnnnnnnnnnnnnnnnnnnnnnnnnnnnnnnnnnnnnnnnnnnnnnnnnnnnnnnnnnnnnnnnnnnnnnnnnnnnnnnnnnnnnnnnnnnnnnnnnnnnnnnnnnnnnnnnnnnnnnnnnnnnnnnnnnnnnnnnnnnnnnnnnnnnnnnnnnnnnnnnnnnnnnnnnnnnnnnnnnnnnnnnnnnnnnnnnnnnnnnnnnnnnnnnnnnnnnnnnnnnnnnnnnnnnnnnnnnnnnnnnnnnnnnnnnnnnnnnnnnnnnnnnnnnnnnnnnnnnnnnnnnnnnnnnnnnnnnnnnnnnnnnnnnnnnnnnnnnnnnnnnnnnnnnnnnnnnnnnnnnnnnnnnnnnnnnnnnnnnnnnnnnnnnnnnnnnnnnnnnnnnnnnnnnnnnnnnnnnnnnnnnnnnnnnnnnnnnnnnnnnnnnnnnnnnnnnnnnnnnnnnnnnnnnnnnnnnnnnnnnnnnnnnnnnnnnnnnnnnnnnnnnnnnnnnnnnnnnnnnnnnnnnnnnnnnnnnnnnnnnnnnnnnnnnnnnnnnnnnnnnnnnnnnnnnnnnnnnnnnnnnnnnnnnnnnnnnnnnnnnnnnnnnnnnnnnnnnnnnnnnnnnnnnnnnnnnnnnnnnnnnnnnnnnnnnnnnnnnnnnnnnnnnnnnnnnnnnnnnnnnnnnnnnnnnnnnnnnnnnnnnnnnnnnnnnnnnnnnnnnnnnnnnnnnnnnnnnnnnnnnnnnnnnnnnnnnnnnnnnnnnnnnnnnnnnnnnnnnnnnnnnnnnnnnnnnnnnnnnnnnnnnnnnnnnnnnnnnnnnnnnnnnnnnnnnnnnnnnnnnnnnnnnnnnnnnnnnnnnnnnnnnnnnnnnnnnnnnnnnnnnnnnnnnnnnnnnnnnnnnnnnnnnnnnnnnnnnnnnnnnnnnnnnnnnnnnnnnnnnnnnnnnnnnnnnnnnnnnnnnnnnnnnnnnnnnnnnnnnnnnnnnnnnnnnnnnnnnnnnnnnnnnnnnnnnnnnnnnnnnnnnnnnnnnnnnnnnnnnnnnnnnnnnnnnnnnnnnnnnnnnnnnnnnnnnnnnnnnnnnnnnnnnnnnnnnnnnnnnnnnnnnnnnnnnnnnnnnnnnnnnnnnnnnnnnnnnnnnnnnnnnnnnnnnnnnnnnnnnnnnnnnnnnnnnnnnnnnnnnnnnnnnnnnnnnnnnnnnnnnnnnnnnnnnnnnnnnnnnnnnnnnnnnnnnnnnnnnnnnnnnnnnnnnnnnnnnnnnnnnnnnnnnnnnnnnnnnnnnnnnnnnnnnnnnnnnnnnnnnnnnnnnnnnnnnnnnnnnnnnnnnnnnnnnnnnnnnnnnnnnnnnnnnnnnnnnnnnnnnnnnnnnnnnnnnnnnnnnnnnnnnnnnnnnnnnnnnnnnnnnnnnnnnnnnnnnnnnnnnnnnnnnnnnnnnnnnnnnnnnnnnnnnnnnnnnnnnnnnnnnnnnnnnnnnnnnnnnnnnnnnnnnnnnnnnnnnnnnnnnnnnnnnnnnnnnnnnnnnnnnnnnnnnnnnnnnnnnnnnnnnnnnnnnnnnnnnnnnnnnnnnnnnnnnnnnnnnnnnnnnnnnnnnnnnnnnnnnnnnnnnnnnnnnnnnnnnnnnnnnnnnnnnnnnnnnnnnnnnnnnnnnnnnnnnnnnnnnnnnnnnnnnnnnnnnnnnnnnnnnnnnnnnnnnnnnnnnnnnnnnnnnnnnnnnnnnnnnnnnnnnnnnnnnnnnnnnnnnnnnnnnnnnnnnnnnnnnnnnnnnnnnnnnnnnnnnnnnnnnnnnnnnnnnnnnnnnnnnnnnnnnnnnnnnnnnnnnnnnnnnnnnnnnnnnnnnnnnnnnnnnnnnnnnnnnnnnnnnnnnnnnnnnnnnnnnnnnnnnnnnnnnnnnnnnnnnnnnnnnnnnnnnnnnnnnnnnnnnnnnnnnnnnnnnnnnnnnnnnnnnnnnnnnnnnnnnnnnnnnnnnnnnnnnnnnnnnnnnnnnnnnnnnnnnnnnnnnnnnnnnnnnnnnnnnnnnnnnnnnnnnnnnnnnnnnnnnnnnnnnnnnnnnnnnnnnnnnnnnnnnnnnnnnnnnnnnnnnnnnnnnnnnnnnnnnnnnnnnnnnnnnnnnnnnnnnnnnnnnnnnnnnnnnnnnnnnnnnnnnnnnnnnnnnnnnnnnnnnnnnnnnnnnnnnnnnnnnnnnnnnnnnnnnnnnnnnnnnnnnnnnnnnnnnnnnnnnnnnnnnnnnnnnnnnnnnnnnnnnnnnnnnnnnnnnnnnnnnnnnnnnnnnnnnnnnnnnnnnnnnnnnnnnnnnnnnnnnnnnnnnnnnnnnnnnnnnnnnnnnnnnnnnnnnnnnnnnnnnnnnnnnnnnnnnnnnnnnnnnnnnnnnnnnnnnnnnnnnnnnnnnnnnnnnnnnnnnnnnnnnnnnnnnnnnnnnnnnnnnnnnnnnnnnnnnnnnnnnnnnnnnnnnnnnnnnnnnnnnnnnnnnnnnnnnnnnnnnnnnnnnnnnnnnnnnnnnnnnnnnnnnnnnnnnnnnnnnnnnnnnnnnnnnnnnnnnnnnnnnnnnnnnnnnnnnnnnnnnnnnnnnnnnnnnnnnnnnnnnnnnnnnnnnnnnnnnnnnnnnnnnnnnnnnnnnnnnnnnnnnnnnnnnnnnnnnnnnnnnnnnnnnnnnnnnnnnnnnnnnnnnnnnnnnnnnnnnnnnnnnnnnnnnnnnnnnnnnnnnnnnnnnnnnnnnnnnnnnnnnnnnnnnnnnnnnnnnnnnnnnnnnnnnnnnnnnnnnnnnnnnnnnnnnnnnnnnnnnnnnnnnnnnnnnnnnnnnnnnnnnnnnnnnnnnnnnnnnnnnnnnnnnnnnnnnnnnnnnnnnnnnnnnnnnnnnnnnnnnnnnnnnnnnnnnnnnnnnnnnnnnnnnnnnnnnnnnnnnnnnnnnnnnnnnnnnnnnnnnnnnnnnnnnnnnnnnnnnnnnnnnnnnnnnnnnnnnnnnnnnnnnnnnnnnnnnnnnnnnnnnnnnnnnnnnnnnnnnnnnnnnnnnnnnnnnnnnnnnnnnnnnnnnnnnnnnnnnnnnnnnnnnnnnnnnnnnnnnnnnnnnnnnnnnnnnnnnnnnnnnnnnnnnnnnnnnnnnnnnnnnnnnnnnnnnnnnnnnnnnnnnnnnnnnnnnnnnnnnnnnnnnnnnnnnnnnnnnnnnnnnnnnnnnnnnnnnnnnnnnnnnnnnnnnnnnnnnnnnnnnnnnnnnnnnnnnnnnnnnnnnnnnnnnnnnnnnnnnnnnnnnnnnnnnnnnnnnnnnnnnnnnnnnnnnnnnnnnnnnnnnnnnnnnnnnnnnnnnnnnnnnnnnnnnnnnnnnnnnnnnnnnnnnnnnnnnnnnnnnnnnnnnnnnnnnnnnnnnnnnnnnnnnnnnnnnnnnnnnnnnnnnnnnnnnnnnnnnnnnnnnnnnnnnnnnnnnnnnnnnnnnnnnnnnnnnnnnnnnnnnnnnnnnnnnnnnnnnnnnnnnnnnnnnnnnnnnnnnnnnnnnnnnnnnnnnnnnnnnnnnnnnnnnnnnnnnnnnnnnnnnnnnnnnnnnnnnnnnnnnnnnnnnnnnnnnnnnnnnnnnnnnnnnnnnnnnnnnnnnnnnnnnnnnnnnnnnnnnnnnnnnnnnnnnnnnnnnnnnnnnnnnnnnnnnnnnnnnnnnnnnnnnnnnnnnnnnnnnnnnnnnnnnnnnnnnnnnnnnnnnnnnnnnnnnnnnnnnnnnnnnnnnnnnnnnnnnnnnnnnnnnnnnnnnnnnnnnnnnnnnnnnnnnnnnnnnnnnnnnnnnnnnnnnnnnnnnnnnnnnnnnnnnnnnnnnnnnnnnnnnnnnnnnnnnnnnnnnnnnnnnnnnnnnnnnnnnnnnnnnnnnnnnnnnnnnnnnnnnnnnnnnnnnnnnnnnnnnnnnnnnnnnnnnnnnnnnnnnnnnnnnnnnnnnnnnnnnnnnnnnnnnnnnnnnnnnnnnnnnnnnnnnnnnnnnnnnnnnnnnnnnnnnnnnnnnnnnnnnnnnnnnnnnnnnnnnnnnnnnnnnnnnnnnnnnnnnnnnnnnnnnnnnnnnnnnnnnnnnnnnnnnnnnnnnnnnnnnnnnnnnnnnnnnnnnnnnnnnnnnnnnnnnnnnnnnnnnnnnnnnnnnnnnnnnnnnnnnnnnnnnnnnnnnnnnnnnnnnnnnnnnnnnnnnnnnnnnnnnnnnnnnnnnnnnnnnnnnnnnnnnnnnnnnnnnnnnnnnnnnnnnnnnnnnnnnnnnnnnnnnnnnnnnnnnnnnnnnnnnnnnnnnnnnnnnnnnnnnnnnnnnnnnnnnnnnnnnnnnnnnnnnnnnnnnnnnnnnnnnnnnnnnnnnnnnnnnnnnnnnnnnnnnnnnnnnnnnnnnnnnnnnnnnnnnnnnnnnnnnnnnnnnnnnnnnnnnnnnnnnnnnnnnnnnnnnnnnnnnnnnnnnnnnnnnnnnnnnnnnnnnnnnnnnnnnnnnnnnnnnnnnnnnnnnnnnnnnnnnnnnnnnnnnnnnnnnnnnnnnnnnnnnnnnnnnnnnnnnnnnnnnnnnnnnnnnnnnnnnnnnnnnnnnnnnnnnnnnnnnnnnnnnnnnnnnnnnnnnnnnnnnnnnnnnnnnnnnnnnnnnnnnnnnnnnnnnnnnnnnnnnnnnnnnnnnnnnnnnnnnnnnnnnnnnnnnnnnnnnnnnnnnnnnnnnnnnnnnnnnnnnnnnnnnnnnnnnnnnnnnnnnnnnnnnnnnnnnnnnnnnnnnnnnnnnnnnnnnnnnnnnnnnnnnnnnnnnnnnnnnnnnnnnnnnnnnnnnnnnnnnnnnnnnnnnnnnnnnnnnnnnnnnnnnnnnnnnnnnnnnnnnnnnnnnnnnnnnnnnnnnnnnnnnnnnnnnnnnnnnnnnnnnnnnnnnnnnnnnnnnnnnnnnnnnnnnnnnnnnnnnnnnnnnnnnnnnnnnnnnnnnnnnnnnnnnnnnnnnnnnnnnnnnnnnnnnnnnnnnnnnnnnnnnnnnnnnnnnnnnnnnnnnnnnnnnnnnnnnnnnnnnnnnnnnnnnnnnnnnnnnnnnnnnnnnnnnnnnnnnnnnnnnnnnnnnnnnnnnnnnnnnnnnnnnnnnnnnnnnnnnnnnnnnnnnnnnnnnnnnnnnnnnnnnnnnnnnnnnnnnnnnnnnnnnnnnnnnnnnnnnnnnnnnnnnnnnnnnnnnnnnnnnnnnnnnnnnnnnnnnnnnnnnnnnnnnnnnnnnnnnnnnnnnnnnnnnnnnnnnnnnnnnnnnnnnnnnnnnnnnnnnnnnnnnnnnnnnnnnnnnnnnnnnnnnnnnnnnnnnnnnnnnnnnnnnnnnnnnnnnnnnnnnnnnnnnnnnnnnnnnnnnnnnnnnnnnnnnnnnnnnnnnnnnnnnnnnnnnnnnnnnnnnnnnnnnnnnnnnnnnnnnnnnnnnnnnnnnnnnnnnnnnnnnnnnnnnnnnnnnnnnnnnnnnnnnnnnnnnnnnnnnnnnnnnnnnnnnnnnnnnnnnnnnnnnnnnnnnnnnnnnnnnnnnnnnnnnnnnnnnnnnnnnnnnnnnnnnnnnnnnnnnnnnnnnnnnnnnnnnnnnnnnnnnnnnnnnnnnnnnnnnnnnnnnnnnnnnnnnnnnnnnnnnnnnnnnnnnnnnnnnnnnnnnnnnnnnnnnnnnnnnnnnnnnnnnnnnnnnnnnnnnnnnnnnnnnnnnnnnnnnnnnnnnnnnnnnnnnnnnnnnnnnnnnnnnnnnnnnnnnnnnnnnnnnnnnnnnnnnnnnnnnnnnnnnnnnnnnnnnnnnnnnnnnnnnnnnnnnnnnnnnnnnnnnnnnnnnnnnnnnnnnnnnnnnnnnnnnnnnnnnnnnnnnnnnnnnnnnnnnnnnnnnnnnnnnnnnnnnnnnnnnnnnnnnnnnnnnnnnnnnnnnnnnnnnnnnnnnnnnnnnnnnnnnnnnnnnnnnnnnnnnnnnnnnnnnnnnnnnnnnnnnnnnnnnnnnnnnnnnnnnnnnnnnnnnnnnnnnnnnnnnnnnnnnnnnnnnnnnnnnnnnnnnnnnnnnnnnnnnnnnnnnnnnnnnnnnnnnnnnnnnnnnnnnnnnnnnnnnnnnnnnnnnnnnnnnnnnnnnnnnnnnnnnnnnnnnnnnnnnnnnnnnnnnnnnnnnnnnnnnnnnnnnnnnnnnnnnnnnnnnnnnnnnnnnnnnnnnnnnnnnnnnnnnnnnnnnnnnnnnnnnnnnnnnnnnnnnnnnnnnnnnnnnnnnnnnnnnnnnnnnnnnnnnnnnnnnnnnnnnnnnnnnnnnnnnnnnnnnnnnnnnnnnnnnnnnnnnnnnnnnnnnnnnnnnnnnnnnnnnnnnnnnnnnnnnnnnnnnnnnnnnnnnnnnnnnnnnnnnnnnnnnnnnnnnnnnnnnnnnnnnnnnnnnnnnnnnnnnnnnnnnnnnnnnnnnnnnnnnnnnnnnnnnnnnnnnnnnnnnnnnnnnnnnnnnnnnnnnnnnnnnnnnnnnnnnnnnnnnnnnnnnnnnnnnnnnnnnnnnnnnnnnnnnnnnnnnnnnnnnnnnnnnnnnnnnnnnnnnnnnnnnnnnnnnnnnnnnnnnnnnnnnnnnnnnnnnnnnnnnnnnnnnnnnnnnnnnnnnnnnnnnnnnnnnnnnnnnnnnnnnnnnnnnnnnnnnnnnnnnnnnnnnnnnnnnnnnnnnnnnnnnnnnnnnnnnnnnnnnnnnnnnnnnnnnnnnnnnnnnnnnnnnnnnnnnnnnnnnnnnnnnnnnnnnnnnnnnnnnnnnnnnnnnnnnnnnnnnnnnnnnnnnnnnnnnnnnnnnnnnnnnnnnnnnnnnnnnnnnnnnnnnnnnnnnnnnnnnnnnnnnnnnnnnnnnnnnnnnnnnnnnnnnnnnnnnnnnnnnnnnnnnnnnnnnnnnnnnnnnnnnnnnnnnnnnnnnnnnnnnnnnnnnnnnnnnnnnnnnnnnnnnnnnnnnnnnnnnnnnnnnnnnnnnnnnnnnnnnnnnnnnnnnnnnnnnnnnnnnnnnnnnnnnnnnnnnnnnnnnnnnnnnnnnnnnnnnnnnnnnnnnnnnnnnnnnnnnnnnnnnnnnnnnnnnnnnnnnnnnnnnnnnnnnnnnnnnnnnnnnnnnnnnnnnnnnnnnnnnnnnnnnnnnnnnnnnnnnnnnnnnnnnnnnnnnnnnnnnnnnnnnnnnnnnnnnnnnnnnnnnnnnnnnnnnnnnnnnnnnnnnnnnnnnnnnnnnnnnnnnnnnnnnnnnnnnnnnnnnnnnnnnnnnnnnnnnnnnnnnnnnnnnnnnnnnnnnnnnnnnnnnnnnnnnnnnnnnnnnnnnnnnnnnnnnnnnnnnnnnnnnnnnnnnnnnnnnnnnnnnnnnnnnnnnnnnnnnnnnnnnnnnnnnnnnnnnnnnnnnnnnnnnnnnnnnnnnnnnnnnnnnnnnnnnnnnnnnnnnnnnnnnnnnnnnnnnnnnnnnnnnnnnnnnnnnnnnnnnnnnnnnnnnnnnnnnnnnnnnnnnnnnnnnnnnnnnnnnnnnnnnnnnnnnnnnnnnnnnnnnnnnnnnnnnnnnnnnnnnnnnnnnnnnnnnnnnnnnnnnnnnnnnnnnnnnnnnnnnnnnnnnnnnnnnnnnnnnnnnnnnnnnnnnnnnnnnnnnnnnnnnnnnnnnnnnnnnnnnnnnnnnnnnnnnnnnnnnnnnnnnnnnnnnnnnnnnnnnnnnnnnnnnnnnnnnnnnnnnnnnnnnnnnnnnnnnnnnnnnnnnnnnnnnnnnnnnnnnnnnnnnnnnnnnnnnnnnnnnnnnnnnnnnnnnnnnnnnnnnnnnnnnnnnnnnnnnnnnnnnnnnnnnnnnnnnnnnnnnnnnnnnnnnnnnnnnnnnnnnnnnnnnnnnnnnnnnnnnnnnnnnnnnnnnnnnnnnnnnnnnnnnnnnnnnnnnnnnnnnnnnnnnnnnnnnnnnnnnnnnnnnnnnnnnnnnnnnnnnnnnnnnnnnnnnnnnnnnnnnnnnnnnnnnnnnnnnnnnnnnnnnnnnnnnnnnnnnnnnnnnnnnnnnnnnnnnnnnnnnnnnnnnnnnnnnnnnnnnnnnnnnnnnnnnnnnnnnnnnnnnnnnnnnnnnnnnnnnnnnnnnnnnnnnnnnnnnnnnnnnnnnnnnnnnnnnnnnnnnnnnnnnnnnnnnnnnnnnnnnnnnnnnnnnnnnnnnnnnnnnnnnnnnnnnnnnnnnnnnnnnnnnnnnnnnnnnnnnnnnnnnnnnnnnnnnnnnnnnnnnnnnnnnnnnnnnnnnnnnnnnnnnnnnnnnnnnnnnnnnnnnnnnnnnnnnnnnnnnnnnnnnnnnnnnnnnnnnnnnnnnnnnnnnnnnnnnnnnnnnnnnnnnnnnnnnnnnnnnnnnnnnnnnnnnnnnnnnnnnnnnnnnnnnnnnnnnnnnnnnnnnnnnnnnnnnnnnnnnnnnnnnnnnnnnnnnnnnnnnnnnnnnnnnnnnnnnnnnnnnnnnnnnnnnnnnnnnnnnnnnnnnnnnnnnnnnnnnnnnnnnnnnnnnnnnnnnnnnnnnnnnnnnnnnnnnnnnnnnnnnnnnnnnnnnnnnnnnnnnnnnnnnnnnnnnnnnnnnnnnnnnnnnnnnnnnnnnnnnnnnnnnnnnnnnnnnnnnnnnnnnnnnnnnnnnnnnnnnnnnnnnnnnnnnnnnnnnnnnnnnnnnnnnnnnnnnnnnnnnnnnnnnnnnnnnnnnnnnnnnnnnnnnnnnnnnnnnnnnnnnnnnnnnnnnnnnnnnnnnnnnnnnnnnnnnnnnnnnnnnnnnnnnnnnnnnnnnnnnnnnnnnnnnnnnnnnnnnnnnnnnnnnnnnnnnnnnnnnnnnnnnnnnnnnnnnnnnnnnnnnnnnnnnnnnnnnnnnnnnnnnnnnnnnnnnnnnnnnnnnnnnnnnnnnnnnnnnnnnnnnnnnnnnnnnnnnnnnnnnnnnnnnnnnnnnnnnnnnnnnnnnnnnnnnnnnnnnnnnnnnnnnnnnnnnnnnnnnnnnnnnnnnnnnnnnnnnnnnnnnnnnnnnnnnnnnnnnnnnnnnnnnnnnnnnnnnnnnnnnnnnnnnnnnnnnnnnnnnnnnnnnnnnnnnnnnnnnnnnnnnnnnnnnnnnnnnnnnnnnnnnnnnnnnnnnnnnnnnnnnnnnnnnnnnnnnnnnnnnnnnnnnnnnnnnnnnnnnnnnnnnnnnnnnnnnnnnnnnnnnnnnnnnnnnnnnnnnnnnnnnnnnnnnnnnnnnnnnnnnnnnnnnnnnnnnnnnnnnnnnnnnnnnnnnnnnnnnnnnnnnnnnnnnnnnnnnnnnnnnnnnnnnnnnnnnnnnnnnnnnnnnnnnnnnnnnnnnnnnnnnnnnnnnnnnnnnnnnnnnnnnnnnnnnnnnnnnnnnnnnnnnnnnnnnnnnnnnnnnnnnnnnnnnnnnnnnnnnnnnnnnnnnnnncgcgcgggggggtccgtagcaggagccgtcgctccgcgcgcctcgccgaagcgccgcatgctcgaggccgtgttcttcggccgtgtactccgtgccgcgcggcgcacgagaggcccgggatcctggcatagtggggccaagtggacggggcccggtcccgcccggcggacggtccgcgggcccgcgtccgctcgccgtcgccgcgaagcgacgcgaggttgaagcggcggaccgggcctcggcttggccgccagagggcccggcccgcggtcccgcaatgggcgcaatgggcgcagcgggtcgcggacccgtgcccgaagttgcgccggccaactcctcgccggtgccgagcagcggcgccgcgcgtggagggtcgccggggccattttcggctctggccgagcccaaaacgggggcgggcggatccccaatgcgtaaccgaagccctagcggatccgcccccgcccggacgtccgccagctcagccgccccagccccgtcgctggccgcgctatagaaagacgcgtcgctggcgaggctggagtggctggccgtggagcactcgctgtcggtggacggcgagcgctcccggggctgccagtccggccaccagaagcgcatgcgccgatgcggtggtgaagggccgaaaaaggtagttggatagaaaagataagtgtagtagttggcctcacgagggataggtgaaagcccccggagaccgtaccgcgattggctagcaagctaaccgaaagcagcagttccaaaaataaatgtgaaaaagaccccaccaaaagcagggaaaccagttttcacactgattagaacagaaagggttaatgtattacctgccggttagtccgttgcgtcctggtagtgactacctgggagtccctaattggtgtgtagttggtgtacgggttgaaccaatcggggggtcggaccatgtgagccggtgcagggtttccgagggcggttccctacatgggtgtggccctgtcggccgcaatgggcctggttgccgtctagcggtggccggagcgcgacggagtccccccggtctccgtcacccgactgcccctggtgtcttggctgggacgctgtgcgtgctggcgggcgcggtgctggctgcaatgcaggttccagatgcggcggctggactgtatgcacgcggcagatagctgccagtccagccgcttcgcatctcgcttgagcagccccaggtgctcggtgtaaaccgagcggttgccaccggcgaccgcaccaagcgagccgtaaacgagcgccgagaggtgcaccttccacccttggcgctcgaggtggcgcttgatgcggtcgtacttggcgcgcttgtgtgcggcgatgcgggccagcgctgagctgtccgggtcctcgcccgcctgctcctcgaacgccacggccaggtcgaccaccgccaccgtcttcttggtgtggttgtacagctggaggtcgggccgtagcgcggggccagcgagcgagggcacggtctggttaacccggagctcaacgcggtcctgccggtcgcccgacgacgacgcgatgagcgcacgctcgatggtcttgagtgcgtcgtcgtggcggccgcggaccgcatccatggtgcccgggcagtggttgagcacatgcgccagcgtctccacccgggagcagcccggctgcctgcatcggtcgtgggcccggaggcgccggcgcttgagcacactgtgcgtgtcgagctggttcaagcgggcggccaccgcgaagcggtagtcagcttcccacatgcctcgcggccgcgtgaggaagctgctgccgacgccgccgtgcgcgcgtgccgttctgccttggtcgcgcatggccgcccacttggtccagtgtctgtgcttgatgtgcagcttcacgtgccgcaggaccgtgcggtggtcgagccacttgtcgtggtgcggcacgcgaagctgcagcgtggccgcggccgtaccggtgtcggcgcacgccggcgcggtcgcgaactggaggccgagcgtgcggaggtggcgctggacgtcgacccagagcgagccgatgtcgccgttgcggcgctttggcggcgcgtcgggcgacgtcccgagctgcgagttgagcagcagctcgcacagctcctcctcgcggcccgcccacacttgagtgtccagccggtggcgcgcgtcggcgatctgccggagctgcacgcgcgcgatgcgctggatggcagggtccttggagttcagcatctgccacccatgcgcgacttgcagcgccgcgtgcagttccgtcagcggcagtaggcccagtccgccgcgcgacaccggtgcgtagaagcactgcgctgtggcggaggctggcagtcgcaggagatggcggaggcctcgcgcgaggtgccggtcgaagcccgcaagctgctgctggaaggggcggaggtggcgaagcgcgtactccacccgagggtagaggtacgtcttcaccgccttcaccacctgccacggtgcgaggcccgactggagcagcgctgtcgcgtcatccttcagctgcttgagcgtgggcgcgagctcgacgcggcggcgtgtgtggtcgaagccgtcgccgacccccaggtaggtgtacgaggcgctcatggacagcgcggggatcggcgacccgtccagctccagcttgaggtcgtccgccttgagcacgccgcggcggtcgcgctggatcgacatggcggagcatttgctggggttggccgccatgccggtccagcggaggaagtcggccacgagcgcgtgctgtcgcttgatgccgtcctcggtgccgctgaagatcttgaggtcgtcggcgtacgccgaggcaccggggcagtcatcgcccgacagcggcactcccgtggccggcagtcgcttcagcgcgaagagcagcgggctgatggcagcgttgaagagctgtgggctgagcgggcagccttggaagactcccacccgcagcgagatcggggccgttgtgccgtcggcggcgttcccgacgacgaacgccgcgctctcgtagagccccttgcacatggtgacgtagtcctcggggacgccgagccgcgcgagtgcatcccatagcagcgcgaacggcacgctgccgaacgcgttgcggaagtcgtaccagacttcgtagagctggcggcgcttgcggcgggcctggtcgacgagcgtggccgcgaggaagttgtgctccccgcagccgttgaccgctcggaagcccttctgccccggggcgtggcggtcgttcgcgtccagccaccgtaccagccgccgcgcgaggacccccgtgtagagcttgtagatggcttgctggaggcaaatgggcctccagttcgccgggtcctcgcgcgcgcccttcttgtgcagcagccgcaccaccccgagcttccagctctggggcacacgtttcgcctcccagcacttctggaaggcggtggcgagcacgggcaggagctgcgcggcgaagtgctggtacacgtcatagccgacgccatcgaggccggggctggaggtgccgtgggcgtgctgcagctgtgactcgatatcgtcctgtgtcggcgcctccgtgagcagctccctgaacctcgacgcggcaggcaggtgggtcatagcggagcggaaggcagcacccgccggggcgtccggagcgaactcctggctgggtgtgttgacgccgtcgaagtaccgccagagctcatcgcccggaatggggcaggtaccgtcgtctgtggcgcctgccgctggcgccgctgggtccgatgcggtgccggcgctggaggctgctgtccttggcgtctcctgctgcgcgcgtgccttggccaggatgtcttcgacgcaggctttctcgtccgtgtcgaaccggtgacgcaggtgctgttggtcgatggccgagttgacgcggccgacgcggcggcgggctcggcgaacagccgtgcggtctccgggcgaagcctgctccacggcgtggaggtcgtccaaggcctcgtcgaggcggtgctcgcggtggtgtcgagtcacccgcggcgggcggcggcgacgtcgccgcttcgctgcaccagagcgcccgcggcgcctgcactgcctccgtcgcgccgagtcctgctgactggcgtcgccatcgcgctcgttgtctccatgtgcatcgccttccaggctgcggcggtcctgcccttggtcgtgcagcgggcgctgccgtcgctgttcgccttgttgccgctgctgccgcgggcactggctgccttggtgctgctgtcgctgacgctggggacgcggctcggggcgtcgctgggcctgggagtacggctgcaatttgtcgtacaggaggtgcgggagggctgtgatgtagccctccgccgactcccagtcactggcgtcagtgatcttggccgccagcgtcgcgccaagccgctccaccatctcgcgggcagcgtcgtcctcggcttcggtgagctggcgtagtcggaggcggggtcgacgctgcggaactgcgtccggcccgatgcgcatggctgcatagacctcgccgtcgtcgatgtcggcgagatcctcgtcctccggctcctgctcctgcatctcgatgttggtgtcggccgcgggtgtcgggggcggagcgcggggtgtcggctggggcggcagcacgggcatagggtccagcgtcgtgttcgtacagccgtcgcctgccgtgtgagcgccgcactccatcatcgtccggcggaggtcgagggctcgattggccaggcggtcggcatgggcattcgcttggcggtcgatgtggtggagtgagaagctccccacccgcgcgagctctaccttgacttggtcgcggaggcggcgtagaacggcgttcctcgccgcgaagatgccgcgcacctgctggatcacaagggtactgtcgccttccacccgcagcgacgtcgctccgtggtcggcagcggctctcgacccgagcagcagcgccgagtactcggcagtgttgttcgtttcgctgctgctcggcatgtagtgggagcacgtccacaccacggagccgtcgggcttgaacagcgctgcaccagctccgccgggtcctgggttggcgcggcaggcgccgtcgaagcgcagcagccactctccggcggtgccgctgtccacgtccatcgccgccgctgtcgccgtccggtcgggtgcggccgccgggttgtcctccttggtctcgccggcagccgtcggctctggtgggagcaggcgagcggcgatccgagacgccaccatgcggcgcggcagcggtgggccccagcgaggcgctggaacctcaccgagacgcgcagctatgcgggtggccaccagctctcggggcagcggaggttcccagcgtggtgctggaatggcaccaaggcgcgcggcgacacggtcagcgaccagagctcgaggtagcgctggcccccatcgtccatggctcggctgctcctgcacttcaacaacttcaacttcgggatgagtggggctcgcaagcgggggggacgctgcgagctccggggttgctggttggggcgagtcgggcgtgacagtggccgccgcgacggtggcgttggctgcggcagcggtggggcttgatgtccctgccactggcggagccgtagccggaggtgcagtcgaacggccggcgcacgcttgcgcgtgcttagctgccgctggccgcgacgcaaagggggtgccgcacgcgcagcccgccagaaacttgtcctggaagactgcgcgccggtgccgagtggtccgatgcctctgcagggagctgaagctggctgccgtgaacgtgcacagcgtgcacgtgaagcgctccgcgttgtgcacgtacacggcgaggacgggagcttggcgggcgcttgctgctggtggcgtgtgcaccggggtttggttctcggctccgtcctcgtccacgagctgcaggtgctcggccggcttctgggcgtcggcgtcgtcgtcgctgttgaggcggcggcgcttgccgtccgggcgtcgctcgctgggccggcgaggcgatgggcggcgctgcctgggccggacgcggccttggtcaacgtccatgggctctgcgggggaaggcgccgcctgcgaggcgcgctgtgcgcaggcgagggcatggctcgtcgccgccatccgcgagtggaacacgaggctgcacgcgcacccgctgtcgaagatgtcggagaagcgggtgccgcggtgcgccgatctgcggtgggcgacgagcgtagccaagttgcctgcgacgtacgcacacacgctgcacttgaactcggtggcgctgtgtgcgtacgtcgtctgcaccggctcctgcgcggcgacttggtcggcagcccgagccgcagcgtcagttgcaactgccgcctcagcaatagctgcagcagtcgcagccggcgcggctccaggcgttggcatgtcggcgagcatgccgcccgccctgccgggccggggcaacacactcgcagggtccgggcggggcttggcggcggcggcggggtcgtcttggccgtccgcgtcgtcgccgtcgtcgtcctgggcgcggcggaggtcgtcggggccctggctgcccgtgggagcgtgcgccgtggcggctgcgggcgctctaccgacgggcagcctgccggccgccctgccgggtcggccagcatcatcggcggggtcttgggggctgctggcggcggcgtcgtggccgtccgaggcttcgtcgtcgctgttgctgtcgtcgtccgggctgctgggccgctggcaggccgccagggcccgcgccgtagccgctgcgagcgccgccccaggcgctacccaatcgggcagcctgccggccgccctgccgggtcctgccaactcgctggggggtcctgcggcggcgccgcgcgctggaggggctggcggggggtcttgagcagccaaacggcgcgcgtgggggtccgtagcaggcgtgggggctgcgcaggagccgtcgctccgcgcgcctcgccgaagcgccgcgtcctcgaggccgtgttcttcggccgtggcgaccgtgccgcgcggcgcacgagaggcccgggatccgggcatagtggggccaagtggacggggcccggtcccgcccggcggacggtccgcgggcccgcgtccgctcgccgtcgccgcgaagcgacgcgaggttgaagcggcggaccgggcctcggcttggccgccagagggcccggcccgcggtcccgcaatgggcgcaatgggcgcagcgggtcgcggacccgtgcccgaagttgcgccggccaactcctcgccggtgccgagcagcggcgccgcgcgtggagggtcgccggggccattttcggctccggccgagcccaaaacgggggcgggcggatccccaatgcgtaaccgaagccctagcggatccgcccccgcccggacgtccgccagctcaaccgccccagccccgtcgctggccgcgctatagaaagacgcgtcgctggcgaggctggagtggctggccgtggagcactcgctgtcggtggacggcgagcgctcccggggctgccagtccggccaccagaagcgcatgcgccgatgcggtggtgaagggccggcccgtaggcagaagaaggaagaagatagaaaagataagtgtagtagttggcctcacgagggataggtgaaagcccccggagaccgtaccgcaattggctagcaagctaaccgaaagcagcagttccaaaaataaatgtgaaaaagaccccaccaaaagcagggaaaccagttttcacactgattagaacagaaagggttaatgtattacctgccggttagtccgttgcgtcctggtagtgactacctgggagtccctaattggtgtgtagttggtgtacgggttgaaccaatcggagggtcggaccatgtgagccggtgcagggtttccgagggcggttccctacatgggtgtggccctgtcggccgcaatgggcctggttgccgtctagcggcggccggagcgcgacggagtccccccggtctccgtcacggctggactgtatgcacgcggcagatagctgccagtccagccgcttcgcatctcgcttgagcagccccaggtgctcggtgtaaaccgagcggttgccaccggcgaccgcaccaagcgagccgtaaacgagcgccgagaggtgcaccttccacccttggcgctcgaggtggcgcttgatgcggtcgtacttggcgcgcttgtgtgcggcgatgcgggccagcgctgagctgtccgggtcctcgcccgcctgctcctcgaacgccacggccaggtcgaccaccgccaccgtcttcttggtgtggttgtacagctggaggtcgggccgtagcgcggggccagcgagcgagggcacggtctggttaacccggagctcaacgcggtcctgccggtcgcccgacgacgacgcgatgagcgcacgctcgatggtcttgagtgcgtcgtcgtggcggccgcggaccgcatccatggtgcccgggcagtggttgagcacatgcgccagcgtctccacccgggagcagcccggctgcctgcatcggtcgtgggcccggaggcgccggcgcttgagcacactgtgcgtgtcgagctggttcaagcgggcggccaccgcgaagcggtagtcagcttcccacatgcctcgcggccgcgtgaggaagctgctgccgacgccgccgtgcgcgcgtgccgttctgccttggtcgcgcatggccgcccacttggtccagtgtctgtgcttgatgtgcagcttcacgtgccgcaggaccgtgcggtggtcgagccacttgtcgtggtgcggcacgcgaagctgcagcgtggccgcggccgtgccggtgtcggcgcacgccggcgcggtcgcgaactggaggccgagcgtgcggaggtggcgctggacgtcgacccagagcgagccgatgtcgccgttgcggcgctttggcggcgcgtcgggcgacgtcccgagctgcgagttgagcagcagctcgcacagctcctcctcgcggcccgcccacacttgagtgtccagccggtggcgcgcgtcggcgatctgccggagctgcacgcgcgcgatgcgctggatggcagggtccttggagttcagcatctgccacccatgcgcgacttgcagcgccgcgtgcagttccgtcagcggcagtaggcccagtccgccgcgcgacaccggtgcgtagaagcactgcgctgtggcggaggctggcagtcgcaggagatggcggaggcctcgcgcgaggtgccggtcgaagcccgcaagctgctgctggaaggggcggaggtggcgaagcgcgtactccacccgagggtagaggtacgtcttcaccgccttcatcacctgccacggtgcgaggcccgactggagcagcgctgtcgcgtcatccttcagctgcttgagcgtgggcgcgagctcgacgcggcggcgtgtgtggtcgaagccgtcgccgacccccaggtaggtgtacgaggcgctcatggacagcgcggggatcggcgacccgtccagctccagcttgaggtcgtccgccttgagcacgccgcggcggtcgcgctggatcgacatggcggagcatttgctggggttggccgccatgccggtccagcggaggaagtcggccacgagcgcgtgctgtcgcttgatgccgtcctcggtgccgctgaagatcttgaggtcgtcggcgtacgccgaggcaccggggcagtcatcgcccgacagcggcactcccgtggccggcagtcgcttcagcgcgaagagcagcgggctgatggcagcgttgaagagctgtgggctgagcgggcagccttggaagactcccacccgcagcgagatcggggccgttgtgccgtcggcggcgttcccgacgacgaacgccgcgctctcgtagagccccttgcacatggtgacgtagtcctcggggacgccgagccgcgcgagtgcatcccatagcagcgcgaacggcacgctgccgaacgcgttgcggaagtcgtaccagacttcgtagagctggcggcgcttgcggcgggcctggtcgacgagcgtggccgcgaggaagttgtgctccccgcagccgttgaccgctcggaagcccttctgccccggggcgtggcggtcgttcgcgtccagccaccgtaccagccgccgcgcgaggacccccgtgtagagcttgtagatggcttgctggaggcaaatgggcctccagttcgccgggtcctcgcgcgcgcccttcttgtgcagcagccgcaccaccccgagcttccagctctggggcacacgtttcgcctcccagcacttctggaaggcggtggcgagcacgggcaggagctgcgcggcgaagtgctggtacacgtcatagccgacgccatcgaggccggggctggaggtgccgtgggcgtgctgcagctgtgactcgatatcgtcctgtgtcggcgcctccgtgagcagctccctgaacctcgacgcggcaggcaggtgggtcatagcggagcggaaggcagcacccgccggggcgtccggagcgaactcctggctgggtgtgttgacgccgtcgaagtaccgccagagctcatcgcccggaatggggcaggtaccgtcgtctgtggcgcctgccgctggcgccgctaggtccgatgcggtgccggcgttggaggccgctgtccttggcgtctcctgctgcgcgcgtgccttggccaggatgtcttcgacgcaggctttctcgtccgtgtcgaaccggtgacgcaggtgctgttggtcgatggccgagttgacgcggccgacgcggcggcgggctcggcgaacagccgtgcggtctccgggcgaagcctgctccacggcgtggaggtcgtccaaggcctcgtcgaggcggtgctcgcggtggtgtcgagtcacccgcggcgggcggcggcgacgtcgccgcttcgctgcaccagagcgcccgcggcgcctgcactgcctccgtcgcgccgagtcctgctgactggcgtcgccatcgcgctcgttgtctccatgtgcatcgccttccaggctgcggcggtcctgcccttggtcgtgccgcgggcgctgccgtcgctgttcgccttgttgccgctgctgccgcgggcactggctgccttggtgctgctgtcgctgacgctggggacgcggctcggggcgtcgctgggcctgggagtacggctgcaagttgtcgtacaggaggtgcgggagggctgtgatgtagccctccgccgactcccagtcactggcgtcagtgatcttggccgccagcgtcgcgccaagccgctccaccatctcgcgggcagcgtcgtcctcggcttcggtgagctggcgtagtcggaggcggggtcgacgctgcggaactgcgtccggcccgatgcgcatggctgcatagacctcgccgtcgtcgatgtcggcgagatcctcgtcctccggctcctgcatctcgatgttggtgtcggccgcgggtgtcgggggcggagcgcggggtgtcggctggggcggcagcacgggcatagggtccagcgtcgtgttcgtacagccgtcgcctgccgtgtgagcgccgcactccatcatcgtccggcggaggtcgagggctcgattggccaggcggtcggcatgggcattcgcttggcggtcgatgtggtggagtgagaagctccccacccgcgcgagctctaccttgacttggtcgcggaggcggcgtagaacggcgttcctcgccgcgaagatgccgcgcacctgctggatcacaagggtgctgtcgccttccacccgcagcgacgtcgctccgtggtcggcagcggctctcgacccgagcagcagcgccgagtactcggcagtgttgttcgtttcgctgctgctcggcatgtagtgggagcacgtccacaccacggagccgtcgggcttgaacagcgctgcaccagctccgccgggtcctgggttggcgcggcaggcgccgtcgaagcgcagcagccactctccggcggtgccgctgtccacgtccatcgccgccgctgtcgccgtccgnnnnnnnnnnnnnnnnnnnnnnnnnnnnnnnnnnnnnnnnnnnnnnnnnnnnnnnnnnnnnnnnnnnnnnnnnnnnnnnnnnnnnnnnnnnnnnnnnnnngacgcaggctttctcgtccgtgtcgaaccggtgacgcaggtgctgttggtcgatggccgagttgacgcggccgacgcggcggcgggctcggcgaacagccgtgcggtctccgggcgaagcctgctccacggcgtggagatcgtccagggcctcgtcgaggcggtgctcgcggtggtgtcgagtcacccgcggcgggcggcggcgacgtcgccgcttcgctgcaccagagcgcccgcggcgcctgcactgcctccgtcgcgccgagtcctgctgactggcgtcgccatcgcgctcgttgtcttcatgtgcatcgccttccaggctgcggcggtcctgcccttggtcgtgcagcgggcgctgccgtcgctgttcgccttgttgccgctgctgtcgctgacgctggggacgcggctcggggcgtcgctgggcctgggagtacggctgcaatttgtcgtacaggaggtgcgggagggctgtgatgtagccctccgccgactcccagtcactggcgtcagtgatcttggccgccagcgtcgcgccaagccgctccaccatctcgcgggcagcgtcgtcctcggcttcggtgagctggcgtagtcggaggcggggtcgacgctgcggaactgcgtccggcccgatgcgcatggctgcatagacctcgccgtcgtcgatgtcggcgagatcctcgtcctccggctcctgcatctcgatgttggtgtcggccgcgggtgtcgggggcggagcgcggggtgtcggctggggcggcagcacgggcatagggtccagcgtcgtgttcgtacagccgtcgcctgccgtgtgagcgccgcactccatcatcgtccggcggaggtcgagggctcggttggccaggcggtcggcatgggcattcgcttggcggtcgatgtggtggagtgagaagctccccacccgcgcgagctctaccttgacttggtcgcggaggcggcgtagaacggcgttcctcgccgcgaagatgccgcgcacctgctggatcacaagggtgctgtcgccttccacccgcagcgacgtcgctccgtggtcggcagcggctctcgacccgagcagcagcgccgagtactcggcagtgttgttcgtttcgctgctgctcggcatgtagtgggagcacgtccacaccacggagccgtcgggcttgaacagcgctgcaccagctccgccgggtcctgggttggcgcggcaggcgccgtcgaagcgcagcagccactctccggcggtgccgctgtccacgtccatcgccgccgctgtcgccgtccggtcgggtgcggccgccgggttgtcctccttggtctcgccggcagccgtcgactctggtgggagcaggcgagcggcgatccgagacgccaccatgcggcgcggcagcggtgggccccagcgaggcgctggaacctcaccgagacgcgcagctatgcgggtggccaccagctctcggggcagcggaggttcccagcgtggtgctggaatggcaccaaggcgcgcggcgacacgttcagcgaccagagctcggggtagcgctggcccccatcgtccatggctcggctgctcctgcacttcaacaacttcaacttcgggatgagtggggctcgcaagcgggggggacgctgcgagctccggggttgctggttggggcgagtcgggcgtgacagtggccgtcgcgacggtggcgttggctgcggcagcggtggggcttgatgtccctgccactggcggagccgtagccggaagtgcagtcgaacggccggcgcacgcttgcgcgtgtttagctgccgctggccgcgacgcaaagggggtgccgcacgcgcagcccgccagaaacttgtcctggaagactgcgcgccggtgccgagtggtccgatgcctctgcaggaagctgaagctggctgccgtgaacgtgcacagcgtgcacgtgaagcgctccgcgttgtgcacgtacacggcgaggacgggagcttggcgggcgcttgctgctggtggcgtgtgcgccggggtttggttctcggctccgtcctcgtccacgagctgcaggtgctcggccggcttctgggcgtcggcgtcgtcgtcgctgttgaggcggcggcgcttgccgtccgggcgtcgctcgctgggccggcgaggcgatgggcggcgctgcctgggccggacgcggccttggtcaacgtccatgggctctgcgggggaaggcgccgcctgcgaggcgcgctgtgcgcaggcgagggcatggctcgtcgccgccatccgcgagtggaacacgaggctgcacgcgcacccgctgtcgaagatgtcggagaagcgggtgccgcggtgcgccgatctgcggtgggcgacgagcgtagccaagttgcctgcgacgtacgcacacacgctgcacttgaactcggtggcgctgtgtgcgtacgtcgtctgcaccggctcctgcgcggcgacttggtcggcagcccgagccgcagcgtcaggtgcaactgccgcctcagcaatagctgcagcagtcgcagccggcgcggctccaggcgttggcatgtcggcgagcatgccgcccgccctgccgggccggggcaacacactcgcagggtccgggcggggcttggcggcggcggcggggtcgtcttggccgtcctcgtcgtcgccgtcgtcgtcctgggcgcggcggaggtcgtcggggccctggctgcccgtgggagcgtgcgccgtggcggctgcgggcgctctaccgacgggcagcctgccggccgccctgccgggtcggccagcatcatcggcggggtcttgggggctgcatgcggcggcggcgtggccggccgcggcggctgggccggcgccggggtcgtcgaggtgctggggggccgtgggggtagccgcgggagcgcgagccggcggggctgcgagcgctctcccagcgggcagcatgccgcccgccctgccgggtcggggcaacacactgctggggtcttgggggccgctgccggcggcggcagggccgtccgaggcttcctcgtcgctgctgctgtcgtcgtccgggctgctgggccgctggcaggccgccagggcccgcgccgtagccgctgcgagcgccgccccaggcgctacccaatcgggcagcctgccggccgccctgccgggtcctgccaattcgctggggggtcctgcggcggcgccgcgcgctggaggggctggcggggggtcttgggcagccaaccggcgcgcgggggggtccgtagcaggcgtgggggctgcgcaggagccgtcgctccgcgcgcctcgccgaagcgccgcatgctcgaggccgtgttcttcggccgtgtactccgtgccgcgcggcgcacgagaggcccgggatcctggcatagtggggccaagtggacggggcccggtcccgcccggcggacggtccgcgggcccgcgtccgctcgccgtcgccgcgaagcgacgcgaggttgaagcggcggaccgggcctcggcttggccgccagagggcccggcccgcggtcccgcaatgggcgcaatgggcgcagcgggtcgcggacccgtgcccgaagttgcgccggccaactcctcgccggtgccgagcagcggtgccgcgcgtggagggtcgccggggccattttcggctccggccgagcccaaaacgggggcgggcggatccccaatgcgtaaccgaagccctagcggatccgcccccgcccggacgtccgccagctcagccgccccagccccgtcgctggccgcgctatagaaagacgcgtcgctggcgaggctggagtggctggccgtggagcactcgctgtcggtggacggcgagcgctcccggggctgccagtccggccaccagaagcgcatgcgccgatgcggtggtgaagggccgaaaaaggtagttggatagaaaagataagtgtagtagttggcctcacgagggataggtgaaagcccccggagaccgtaccgcgattggctagcaagctaaccgaaagcagcagttccaaaaataaatgtgaaaaagaccccaccaaaagcagggaaaccagttttcacactgattagaacagaaggggttaatgtattacctgccggttagtccgttgcgtcctggtagtgactacctgggagtccctaattggtgtgtagttggtgtacgggttgaaccaatcggggggtcggaccatgtgagccggtgcagggtttcctagggcggttccctacatgggtgtggccctgtcggccgcaatgggcctggttgccgtctagcggcggccggagcgcgacggagtccccccggtctccgtcacccgactgcccctggtgtcttggctggggcgctgtgtgtgctggcgggcgcggtgctggctgcaatgcaggttccagatgcggcggctggactgtatgcacgcggcagatagctgccagtccagccgcttcgcatctcgcttgagcagccccaggtgctcggtgtaaaccgagcggttgccaccggcgaccgcaccaagcgagccgtaaacgagcgccgagaggtgcaccttccacccttggcgctcgaggtggcgcttgatgcggtcgtacttggcgcgcttgtgtgcggcgatgcgggccagcgctgagctgtccgggtcctcgcccgcctgctcctcgaacgccacggccaggtcgaccaccgccaccgtcttcttggtgtggttgtacagctggaggtcgggccgtagcgcggggccagcgagcgagggcacggtctggttaacccggagctcaacgcggtcctgccggtcgcccgacgacgacgcgatgagcgcacgctcgatggtcttgagtgcgtcgtcgtggcggccgcggaccgcatccatggtgcccgggcagtggttgagcacatgcgccagcgtctccacccgggagcagcccggctgcctgcatcggtcgtgggcccggaggcgccggcgcttgagcacactgtgcgtgtcgagctggttcaagcgggcggccaccgcgaagcgatagtcagcttcccacatgcctcgcggccgcgtgaggaagctgctgccgacgccgccgtgcgcgcgtgccgttctgccttggtcgcgcatggccgcccacttggtccagtgtctgtgcttgatgtgcagcttcacgtgccgcaggaccgtgcggtggtcgagccacttgtcgtggtgcggcacgcgaagctgcagcgtggccgcggccgtgccggtgtcggcgcacgccggcgcggtcgcgaactggaggccgagcgtgcggaggtggcgctggacgtcgacccagagcgagccgatgtcgccgttgcggcgctttggcggcgcgtcgggcgacgtcccgagctgcgagttgagcagcagctcgcacagctcctcctcgcggcccgcccacgcttgagtgtccagccggtggcgcgcgtcggcgatctgccggagctgcacgcgcgcgatgcgctggatggcagggtccttggagttcagcatctgccacccatgcgcgacttgcagcgccgcgtgcagttccgtcagcggcagtaggcccagtccgccgcgcgacaccggtgcgtagaagcactgcgctgtggcggaggctggcagtcgcaggagatggcggaggcctcgcgcgaggtgccggtcgaagcccgcaagctgctgctggaaggggcggaggtggcgaagcgcgtactccacccgagggtagaggtacgtcttcaccgccttcaccacctgccacggtgcgaggcccgactggagcagcgctgtcgcgtcatccttcagctgcttgagcgtgggcgcgagctcgacgcggcggcgtgtgtggtcgaagccgtcgccgacccccaggtaggtgtacgaggcgctcatggacagcgcggggatcggcgacccgtccagctccagcttgaggtcgtccgccttgagcacgccgcggcggtcgcgctggatcgacatggcggagcatttgctggggttggccgccatgccggtccagcggaggaagtcggccacgagcgcgtgctgtcgcttgatgccgtcctcggtgccgctgaagatcttgaggtcgtcggcgtacgccgaggcaccggggcagtcatcgcccgacagcggcactcccgtggccggcagtcgcttcagcgcgaagagcagcgggctgatggcagcgttgaagagctgtgggctgagcgggcagccttggaagactcccacccgcagcgagatcggggccgttgtgccgtcggcggcgttcccgacgacgaacgccgcgctctcgtagagccccttgcacatggtgacgtagtcctcggggacgccgagccgcgcgagtgcatcccatagcagcgcgaacggcacgctgccgaacgcgttgcggaagtcgtaccagacttcgtagagctggcggcgcttgcggcgggcctggtcgacgagcgtggccgcgaggaagttgtgctccccgcagccgttgaccgctcggaagcccttctgccccggggcgtggcggtcgttcgcgtccagccaccgtaccagccgccgcgcgaggacccccgtgtagagcttgtagatggcttgctggaggcaaatgggcctccagttcgccgggtcctcgcgcgcgcccttcttgtgcagcagccgcaccaccccgagcttccagctctggggcacacgtttcgcctcccagcacttctggaaggcggtggcgagcacgggcaggagctgcgcggcgaagtgctggtacacgtcatagccgacgccatcgaggccggggctggaggtgccgtgggcgtgctgcagctgtgactcgatatcgtcctgtgtcggcgcctccgtgagcagctccctgaacctcgacgcggcaggcaggtgggtcatagcggagcggaaggcagcacccgccggggcgtccggagcgaactcctggctgggtgtgttgacgccgtcgaagtaccgccagagctcatcgcccggaatggggcaggtaccgtcgtctgtggcgcctgccgctggcgccgctaggtccgatgcggtgccggcgctggaggccgctgtccttggcgtctcctgctgcgcgcgtgccttggccaggatgtcttcgacgcaggctttctcgtccgtgtcgaaccggtgacgcaggtgctgttggtcgatggccgagttgacgcggccgacgcggcggcgggctcggcgaacagccgtgcggtctccgggcgaagcctgctccacggcgtggaggtcgtccaaggcctcgtcgaggcggtgctcgcggtggtgtcgagtcacccgcggcgggcggcggcgacgtcgccgcttcgctgcaccagagcgcccgcggcgcctgcactgcctccgtcgcgccgagtcctgctgactggcgtcgccatcgcgctcgttgtcgccatgtgcatcgccttccaggctgcggcggtcctgcccttggtcgtgcagcgggcgctgccgtcgctgttcgccttgttgccgctgctgccgcgggcattggctgccttggtgctgctgtcgctgacgctggggacgcggctcggggcgtcgctgggcctgggagtacggctgcaatttgtcgtacaggaggtgcgggagggctgtgatgtagccctccgccgactcccagtcactggcgtcagtgatcttggccgccagcgtcgcgccaagccgctccaccatctcgcgggcagcgtcgtcctcagcttcggtgagctggcgtagtcggaggcggggtcgacgctgcggaactgcgtccggcccgatgcgcatggctgcatagacctcgccgtcgtcgatgtcggcgagatcctcgtcctccggctcctgcatctcgatgttggtgtcggccgcgggtgtcgggggcggagcgcggggtgtcggctggggcggcagcacgggcatagggtccagcgtcgtgttcgtacagccgtcgcctgccgtgtgagcgccgcactccatcatcgtccggcggaggtcgagggctcgattggccaggcggtcggcatgggcattcgcttggcggtcgatgtggtggagtgagaagctccccacccgcgcgagctctaccttgacgtggtcgcggaggcggcgtagaacggcgttcctcgccgcgaagatgccgcgcacctgctggatcacaagggtgctgtcgccttccacccgcagcgacgtcgctccgtggtcggcagcggctctcgacccgagcagcagcgccgagtactcggcagtgttgttcgtttcgctgctgctcggcatgtagtgggagcacgtccacaccacggagccgtcgggcttgaacagcgctgcaccagctccgccgggtcctgggttggcgcggcaggcgccgtcgaagcgcagcagccactctccggcggtgccgctgtccacgtccatcgccgccgctgtcgccgtccggtcgggtgcggccgccgggttgtcctccttggtctcgccggcagccgtcggctctggtgggagcaggcgagcggcgatccgagacgccaccatgcggcgcggcagcggtgggccccagcgaggcgctggaacctcaccgagacgcgcagctatgcgggtggccaccagctctcggggcagcggaggttcccagcgtggtgctggaatggcaccaaggcgcgcggcgacacggtcagcgaccagagctcgaggtagcgctggcccccatcgtccatggctcggctgctcctgcacttcaacaacttcaacttcgggatgagtggggctcgcaagcgggggggacgctgcgagctccggggttgctggttggggcgagtcgggcgtgacagtggccgccgcgacggtggcgttggctgcggcagcggtggggcttgatgtccctgccactggcggagccgtagccggaggtgcagtcgaacggccggcgcacgcttgcgcgtgcttagctgccgctggccgcgacgcaaagggggtgccgcacgcgcagcccgccagaaacttgtcctggaagactgcgcgtcggtgccgagtggtccgatgcctctgcagggagctgaagctggctgccgtgaacgtgcacagcgtgcacgtgaagcgctccgcgttgtgcacgtacacggcgaggacgggagcttggcgggcgcttgctgctggtggcgtgtgcaccggggtttggttctcggctccgtcctcgtccacgagctgcaggtgctcggccggcttctgggcgtcggcgtcgtcgtcgctgttgaggcggcggcgcttgccgtccgggcgtcgctcgctgggccggcgaggcgatgggcggcgctgcctgggccggacgcggccttggtcaacgtccatgggctctgcgggggaaggcgccgcctgcgaggcgcgctgtgcgcaggcgagggcatggctcgtcgccgccatccgcgagtggaacacgaggctgcacgcgcacccgctgtcgaagatgtcggagaagcgggtgccgcggtgcgccgatctgcggtgggcgacgagcgtagccaagttgcctgcgacgtacgcacacacgctgcacttgaactcggtggcgctgtgtgcgtacgtcgtctgcaccggctcctgcgcggcgacttggtcggcagcccgagccgcagcgtcagctgcaactgccgcctcagcaatagctgcagcagtcgcagccggcgcggctccaggcgttggcatgtcggcgagcatgccgcccgccctgccgggccggggcaacacactcgcagggtccgggcggagcttggcggcggcggcggggtcgtcttggccgtccgcgtcgtcgccgtcgtcgtcctgggcgcggcggaggtcgtcggggccctggctgcccgtgggagcgtgcgctgtggcggctgcgggcgctctaccgacgggcagcctgccggccgccctgccgggtcggccagcatcatcggcggggtcttgggggctgcatgcggcggcggcgtggccggccgcggcgtctgggccggcgccggggtcgtcgaggtgctggggggccgtgggggtagccgcgggagcgcgagccggcggggctgcgagcgctctcccagcgggcagcatgccgcccgccctgccgggtcggggcaacacactgctggggtcttgggggccgctgccggcggcggcagggccggcgaggccgtcgtcgtcctcgctgctgtcgtcgtccaggtcgctgggcccgtggcggaccgccagggcccgcgccgtagccgctgcgagcgccgccccaggcgctacccaatcgggcagcctgccggccgccctgccgggtcctgccaattcgctggggggtcctgcggcggcgccgcgcgctggaggggctggcggggggtcttgggcagccaaccggcgcgcgtgggggtccgtagcaggcgtgggggctgcgcaggagccgtcgctccgcgcgcctcgccgaagcgccgcatgctcgaggccgtgttcttcggccgtgtactccgtgccgcgcggcgcacgagaggcccgggatcctggcatagtgaggccaggtggacggggcccggtcccgcccggcggacggtccgcgggcccgcgtccgctcgccgtcgccgcgaagcgacgcgaggttgaagcggcggaccgggcctcggcttggccgccagagggcccggcccgcggtcccgcaatgggcgcaatgggcgcagcgggtcgcggacccgtgcccgaagttgcgccggccaactcctcgccggtgccgagcagcggcgccgcgcgtggagggtcgccggggccattttcggctccggccgagcccaaaacgggggcgggcggatccccaatgcgtaaccgaagccctagcggatccgcccccgcccggacgtccgccagctcagccgccccagccccgtcgctggccgcgctatagaaagacgcgtcgctggcgaggctggagtggctggccgtggagcactcgctgtcggtggacggcgagcgctcccggggctgccagtccggccaccagaagcgcatgcgccgatgcggtggtgaagggccgaaaaaggtagttggatagaaaagataagtgtagtagttggcctcacgagggataggtgaaagcccccggagaccgtaccgcgattggctagcaagctaaccgaaagcagcagttccaaaaataaatgtgaaaaagaccccaccaaaagcagggaaaccagttttcacactgattagaacagatactacacttgatcttagccaaaggccgagaaggtatgattttaattaacataccgcgtgtgtagctaatgtagaattagtacccttacgtacaatcaattgtagttacgtttatatatttcatttttagccttaagtactgcaattatagccccttttgactttttaatggtggtgccatagcctctttggatgaagaaattacgtttctacactgaagttgaagtgccttcttccatgacaactgcgtcctccagttgctgaggtgctcgcagtcaatgccattgacgtggccgtaatacactttgtgaaccgtgttcatatccataagggaacacggataaatgcctacctatccctccctgcaaagtccccacggaatgctgcgaatctgccggttagcgcaacgaattaggtagtttctttcgcacggcagcaacgccaagacacggagctccacgatgctctgacaatgcgccacaccgcggccgaagctggtctcgccggcgtataatccgcttgatgacctccagccaatcagatgcctcatccgccgtccgcgccccatctccagttgccaaaccgtttccaagcacgcagtacctgagctgaggcgatgtcggagcgggcggagcggctctcaggcctccagaatggcgccgtgggctccatcgccggcatgatcgaggtgatgctgcagcagccgaccgtggccatcaagaacgccgtgcagcaaggccgccccatcccgtggtccgtgccggcgctctaccgcggcgtgggtgtctcgctggcctccatcgcgcccgtgagcgccatccagttctccgtcaacggccgcttgctgcgcgccttgactgccccggggacggcaccgtcggaccagaccaaggtgctgtgcggaacactgtcaggcgtcgcgtcggccgtgctcagcgcccccgcggagcttgtgatgactctgcagcagaacaacggcaagagcttcggcgccaccgtcaaggagatcgcccaagagcacggcgtggtgcggctgatgcgcggcttcacggcaacggcggtgcgagacgccgtgtggtgcgctgggtacctggcgctgggcccggtgttcacgcgcgagatgcacacgctgagcccggccaccttcggccgcgcggacactgccaccaagtcgcagaaggcctcggcctccatcgccggctgcgtcacggccgggcttatgacggtggcggctacgcagcccgtggacaccgtcaagaccgtgatgcagggcgaggccatgacgctgccctcgggtcgcgcacccagtaccctcgccactgctgcccgcatctaccgcgaagggggcttgccgcgcttctaccgcggcatcgtgccgagaggatgccgcttggtcggtgccgtcttcatcctggggcagtcgcgtatctggctcgaggagctcttcgaggagcacgcgctgctcaagttctagatcacctggtagacagatactctgcgccgcatgtgtagagctcgcttcaaccgatagtcacccactgcaagccgagcatgagcatttcaacacgattccattgccgcggcgcagtctagcagtcttctgtccagagtctccgctgtaaatggcttcactagtcgccaacagctacactagccgaagggaatttttgctgacgatgaccattgaaggtcagcgattcgctggccgcgtcggtacaacgacctacgcaaacatgtagcagcagctcaccttggtattatcactcgcctatccgatccgacagcaacatgacggagcgtgcccagcgcctcacggcgctgcagaacggagccgttgggtccctggccggcatgatcgagatgaccatccaacagccctgggtagccgtcaagaacgcggtgcagcagggccgccccgttccccgctcgattccggcgctctaccgcggtctgggcgtatccttgtcctccattgcgccggtgagcgccattcgcttcgccatcaacggacgactgctacgggtgcttaacgggacggactcggctccgacggcccagaccaaggtgctctgcagcacgatctccggggccaccgcggcggccatcacgagccccgccgaactcgtcatgacactgcagcagatcaacggacgcagcattggagcaaccgtgaaggcggtactggagacccacggagtgacgagactcatgcggggatacccggccactgctgtgcgtgacgcagtgtggtgcgccggatacttggcgctgggtccgctgttcacgcgcgaggtgcaccgcttgagacccgagacattcggccactacgacacagccactgcgtcgcaaaaggcatcggcctccattgcgggctctctggtcgctggactcaccgtggttccattgacgcagccagtggatactatcaaaacagtcatgcaaggcgaggccatgaagctgccgccaggccgcggacccaacatgctcgccactgctaggcgcatgtaccgcgaaggaggagtgcggaggttctaccgcggcatcgtggcacgtggaagtcgactcgtcggtgcggttttcatccttggacaggcccgtatgcggctagagaagctcttcgaggaccacggcctgctacggttcgaggttgttgcaaactatgaacatgagtgagcaacgttaggaacgagagcgcgagatacacaccaagaagtcagtcgcaacgggccatactcgcttcttgctgtgtaactagaagcgtatgtccttcaacattggtttgttaatgagtgccataggtctacttcttctgctttcgaggttcttgcggcctacgagactgtgcagtggcaacccgccactcgaatcaattgcggtccatcttcctctccaggtggcgcggcctgatgcggaagtgtgacgcggatcttgccggtgagggtgcctgcggccttaccatgcagcacaacaggcacctcgaatggcagaaagcgtggtcggttcaggcaaaacttctctagcgacaccgacgcaacacctaaccaagccaagaacattgatcagtctccgacaccgaagttctactcaaatgccaacttacccatcaggtcgtccttcgaggtggcgtcgtagtccataacgaccaaggtcaagtggacgtgcttcacgtcgcgttcattgtcacacaacacgtgcagtttgggaacctggtcgtctcgccaccttgacacaaacgtgcacatagccgaatatgagtcaagctgatgatcataatccagaaaataaataaacaaacttaccttggtgagcacgtgtttgagatcgtggacgtgcttgggtggctcccgttcgagtctacttgcaccgcgttgcttggtgtcgagtaaaacttgacgtaggggtcactgagccccgccaagtcaagccccaggaggtctttccccgcgagttcgatgatttcgacaagcgtggtcgtttccgccgtgccagagctaatgggcggcgtccgacccacttgaaacgaagccgccactggtttgtgatcactggttgcaattgcctcatagcacgaaaagcgttgcaacttaatgttgccacgcaaccctggcagcgacttgtataagacgcggtcgcagtaggacggaatacgctccaactacaaaatgcacgacaagtgagataaagtgcgccgaagatcaagtcaggggcatccaaaacgcaccaagtactcgtcaagactgtgtcgcactcgcttgaatgttggagggaagagcgccggtggcagttcccacccagtgagcgccttcttgagatcgatctggtgcttgagttggtcgttctggttcaacaccgcccatttcttggcacgcacaagcgccatgacctcggcgcagtgtttctcatggttgcgttggcgtggggccgtgtagttcatgtccaagcggtagttgaggtcaccgaaccagaagcagtggtcaaactggtggtcgatcgacacgttcttttgaccaaactgcgcgccaagaatggtagcgcactaaacacagcaaagaccacaacaacccacggtgagcacgatgggaaatacgctcaactaactatctagtagcagatagagcatacatcagcgttgcgtttgtcaaggaacttttgatcttggtgtgcagccaagtggcaactagcaaagcacagcgacgtgttttcgacgacacacttgaacagcagaccaccctatcgccacagacgataaaccgtgtcagtcaaactatcaccaatatttcgatttgtgatgggtagtaccttgttgccgatgacacttcccaagcccgtcgggactgcaagcttctccacatcgcacacattgttgcgctcgtgaacgtagacaaacagcctcatctccatcagctccacctttcctgctagtacgtagctgtctccgaggtgcaggtagatctgtttgctaaatgggtagtcgagcacgtcgcccatcgtgtcgcgcaggttgctgctcagttgacgcaccattctcgtcatcttgcgcatcgactttttcgtgcgggatcgctttacgatcacgtccgaggacttgctggggccaacggaactgccattgctctggtctgaggttgagctgttgaacggtccaccggcacgaccatttcgtatcgcctcactgttgttctcgtcagtggtcgacgagctcttgtgggcgccggatctttttatcgaagctctgttcccagcgtcatcaagtttcaggtcgctttcctcgtcctcgtcttcctcctcctcctcgccctcttcaaagtcagtaccatcaataacactgtccagcccaggagagtccgtgtcgatgtcctcctcctcctcctggtcgtcagccttggagctggaatggtgccagctgtccgttcgcaccaagttctccgataccttttcattcttgtacgtgctctcctgcagcccgactgcaatgacgtcgtagtcaccaccaccttccgggatccagtcgttcaaaagtttcgagtcctttggtggcatcgtgttgcccacgttccaggaagccacgaggattttcagttgagtgcccgaggtcatgaggttcacggaagccctccgacctaacgggctcgtcgagggtgaagctggggcggagttgacggtttgtctccgaggcggaggtgactcatgatcgacctgcagatatacaaaccaagtccgtcagaccgcacaaggagcatacgcaaaggtggcggttcagcctcacctcgagtttgatatcgtcgacctcgactcgaggagccgtggattctgctgcttcagcaggctcagcgtccggaaccgcatcaacctcttgtttctcctccattgcggctaactgccctccgtgacaaagctaagtgtgtcgaatgttcagacgtcgcggcacaacagacgtgtagataaaaatataggctggctggaagctatatcggactctcctgcgcatgatagctccaaacgcatggaaacgctgttggtaaacgtaactcgttcatccccgacacgactgcgtgccctaccgcaacgggtaccgccagtattactaggtaaacagttcaaatgggggagtctactaagtcgctgagtgatttggcgtgatgggggcactcgattccttcgtcgggctgttgagacgttcgtcgttcgctttcgcaagctcaattttcttcctcggggtacaaggagctgagtgcgttggactcttttgagcttcttcaagccccgccagactcggcaaggggcgtgtgggtggatcactacatgcacgcaaaattcattgcactaaagtgagcaccaccaaacagcaagctttaggtcgtgatagccttacctcccgacagcacttctgtattgttctctcaaaaagttgagatcttccgttgcactcgccagactcgtctctaactgcgcacactttgcctgcaactcctcatacgttggtttggctgtcccacaacgaatagtacgaagtcaggaggcaggtagcaacagtacggccatacacagtataatgcacgaacctgcgtgtccttccgcgagttgcgcagcaatagcggggttcttcgtcgatattttatccttgggcggatcgagaatgtacgggttcacgaacacttggaattcgaggcgtgcgctttggagatactcgatgaactgctccgtgacgcaatccacgtggtgaatgaactcgtagttgaacacggggctccgcgtgttctgctcgacactttcagtcgtgaagagttcgcctaggaactcatactggcagtaggccaaatcggtaatgatggggaggccggtagcgccaacgatgcgaatcttgaacgtccagggcttccccaggagatcactcggattctccaaatccatcaagtcgtcctcgttgtgcttctcgggatcgggcgacgatagaggaatccacataacctggagtttcccaatagtgttgaacggcggcacagccaacttaatgctgagttgagactcatcgggctccgtctccaagttgtacagcaagtactcgaggaaagtagtagcactaccaatgtggaaggagttgtcaaaaagtagcgtgatcgggtcgtggcctgccggtgactcgtactcgcggtcgttcataagcgcgttgcgtaggaacgccacttcatctttgagtagtgcgtgcgcctttacaaactcgaagacatcaaggaaaatggtctcgtccgtggctttgttgtacactttgactttgaccttcgggattccacttgtaccagtgccgtccttgtcttccatagaggagctctgcaacgccgtctcaaagcttaacacgtcgcggttcaagaacttgacaatctgagtaagttccgcaatcttgggcaggacttcccggagttcttgatcattcacttgtcgagccaaaagctcgcgctgtttctcagccgcgagtcgtgcttcttcctccgcttttgctgctgcagccgcggcctctgccgtcgcagcttcggcagcagcagagttggcatcattattggcactagcagcggccgcctcgcgttccagtcgttccttttcccacctcgccttctcctcctcgaacttcttcatttgctcttgcagctcattcatcgcggaggtgtcaactgtctgcagagcttccttatactcggcagcggcagtgtcagccgaaggcggttcaccttcaggctcacgccccggatatacgaagagcatgagctcgtttccgatcacgacacggtcgtacggatcaagctgtatgcgtgcacctttatcaatctttttcccgttgcgcataacttctccagcacctgcacaaaggaagatctccgtgccatcattctcaaatgaacagtgaccgttgacaatgctgagcgacatgggctgaatgtcgccttgtggtcccacagtgaggtgaggcttatcgagcaggaacatgaatcgcttcgaccgataagcgtccacgtccaggttgataaggtacggggactttgtgtcagcttcaaagtgatacaagtgaattccacgcttgccgtactcctcgcgttgcctctgcatcatttcatcttgcacgctcatgccaccactggcacctccagttcccccactcaacacgttctccaactccttttgcttctggttgagcaactcggccaactgtgcgacctgtgcactggccacatcgtctccaccagtttcggcgtcgccatcttcaccagcttccgcacttggtgaagcacccccagctgcactgcgcatcttcgcgatgcgctcgttttcctctttcaactggctcacgagagccttcatctgctctagttcggccataagcttccgctctgcagggctagcagcagttgaagccttcttcggctggagtttaatgaccgaggcgttcttggcaaagcccagagttgaaaatgtatagccgtgaaacttgacttccggtcggatagcgcagaacaaatacgttcgtgcttgcagcatcgtgtccttgagatacttgcacaggaagtacgagttacatccgggaatggacatccccggcttgagcttgttggccttgacagcctcagccatcttcatgaagaactgcgccatttccgtgagcgacaggttgatcttcttgccctggtcctgcaactccttcgactttgacgcatccgggtgggggcccaagtacttgtgctcgatttcgccgttctcatacacgactttcttgtagtcggcgtagacaatatcaccagcaggctctgtaccggcgagatcacacacgtaaacacgccctctctgcttcatcccttcgcgctctggatcaggtttctccacctcaagagtcatgatgcagtgcccacgcgtagactggtgattgaactgcgtcggtgcgatagccttcttggcattggctgccatgaacgtcttgcgcaagtcgttccagtctttgagcacaacggactggcaccagtcgatgtctgtgaatccgtcggggtccttgcgcatacctgacttgtactgctgctcctgtgcgaccggggacattagatcgcgcacggtatccacgacgttttgaaagtacttcatcgagatcttccagccgtcctgcttctccttgaacaactcgtacgccagacgcggaaaaatcccccactgacaggcacacacatacacacatcaaaaccaaggatcatgtgcacttttaattaaacgatatgccttctccgtaccagtggatggggatcctcgtgcttgaaccatgcctcaggaatgtcgacagcgtccggctacgagtttccagaacaaataatcagcaggttagtcctagatataaaaacaaacaaagctcgaacctaccccgaacactgtgaacgtcttgccagacccggagaggccgtaggcgaagagcacgacggcgttgcctcccatcaggtctgccttgatctttagtccgacgctttcgtaggccatttgttggtcgacgagtgtcatattgtcggcttgcagcgagtcgccctggatgtgccgcttgtagccgtaggcgctccaccacgcgtagctgaaggggaacctcgtagtggagtacgtggagttgatgagctccacatcgccttcctcttcaccattctgggtcatcaccactcccagcttgtcgtcgcatgtgaacggccggcatcgtaccgacaccttgatgctgacgctcatagcgctagcagctcaataccgacgagtgtacagctcttcgcaaagctgcagtggcttgcgatgtgtttgtgtcccttgcccgaaaagtcgggtggtcgtggtgtccattgcaacggcagctcaagaggcacatggatatgcccgaaaacaaactcagtcgcagctacagttcaattagaggtacgtcgcagtacttcagagggttaatgtggtcgaggaatggattgtatgggagactgtgcttctaagatcgacctacatgacgacacgagttcaactgctattccgcaccgctcgtctcatgcgttgctgaggctttcacaagcctcacgcatcttctccaagtattccgccgcgtgcttcggctggaagacgagcgccgggcggaagcgaaccgagttcacgccgcagcctccggaggccacacccttcgacttcatcagacccacaaagtcgttgcgcacagcttccgtcgggaagtccatggccaggtaggtaccctggccgcgcacgttggaaacgagcgtcgggaactcagcagcaagttcgtgcagcccggccttcaggtagtcaccagtgatctggacgttctcgagcaggctgtcgctctcgaccacgtccagcaccgccttcaacgtgatcatcttggtggggtctcccatccacgtgttgaagatgcggtatccctccttgagacggaactctttcttggcgaagtagccacccgtctgcatcttcttgctaaacgtgacgaggtcgggcgggttctccagctcccagtgctcgtgcgcccagaatttgccggtgctgccgcctccggtctgcacctcgtccacgatgaacgccacgccgtacttcgcagccaggtcacgcagtgaacggaagaacgccgggctcgcgtggttgtctcctccctcggcttggatcggctcaataatcatgccggcaatgcgcgagtcttccgccttggtcacctccgcgctgtgcttcagcagcctctcgacctcatccaagcaccgcgcttcttccgcttcattggcagcttggtggacatctagcgggtatctgagcttggggaacggcgccacgggccagtcaaaggccggcacgtccaccttgtggatggctttcgagtgggtcgtcgacagacagcccaaaaggcggccgtggaagcctccctggaaagacagaatgctcaagttgggagtgcccggcagctggtgcgccatgctcgtctccagatcgtgctcggacgggggtcggccgcctcgcagcttggtctggaaccacatgaagacggccttgtaggcgttttcgttggagcacgagccgcacatgagggtgttgacgtcctccatcccctcgggggccaccttgagcagcgtgtcgtcgatgcggtcgacccagtcggcaggcgggaacacgcccagacacgggcgctgcgccagcaaggccaggttgtccttgtcgctcatggcctcgaggatcttggggtggttgtagccgatgggcagcgacgcgatctggccgtagacgtccaggaagcggttgccgtccacgtccacgaggtagttgcctctgctggccgcgtagtcggcgaagaagttgatggcgcccgtgttctgcagcgcggcgaggcgctcgagctgctgctgcgacttggggccgggcacttggcccgtcacgatctcggcgtgcgcgtactcgtcagggaaggcgggcgcgggcgtggacggcagggcgcggccgcttgcggtggacagcgagcgccgccacggggagcagcgaggcttcaaggcgcgcagacacagcgacatgagcggcgggcggcagggaggaggagggggcgcttgcttccgatggtgcagattgcggaatgacgcggatcgcgatcggctgggtgaaggacttcaagttgcggttgacttggagtttgtatgaggagtgatggtcactggagtctcacggatttgctgcgagggagtcggtcgagctttacaagcagcgcgtcattgatcaggcggtgccggtaagcaaggcgtttatggttgaaggtgcagtcggcattgcaggcgtaacatattcacactgcgtctgcagtggatgctcacggttcgaccatgtctctccccacccgcgaccaggagaacttgccgcgctcaatcgagactcagagcattacgcttcttgttggcatatcaactgcacgtaccgagcagactcttacttcaatggatcccggtggtttggcttgggactccccccccccccgactggtgagaccgaactgtttggattcaaagcctcagaacctttgttcgtgtgggtatctaacgttagaagaggcattaaacttcgcccgatgaactgcaacgcatgacttgagtttgaggatgtcatctttgccaattagatctcactgagattctcaggggggctgcaaacacatccacatgagcgggaatctggttgaattgatgaattccactgatgacttgtgtttccaggactacagagaaccaacctgccagtaaatactctgcggcacggtcggagtgtacgcgcgctgatcgctgagatccagattttggacgagcaacttccttaacagcggttatacgggtgtattgttgtacgccgtacaaccgattgcgtaataatgagccacaaagaaacgcgcaccggtgcaccagacctctgtgaacgaagtgaacgggtgaatgggggtgaacggcgggaattgggcagaactttcatcgtccagagacgagccctaagtaaaaaggaagagtccagccaatcatatctcaggagttgattctatgtatatatatgtaccttttcatgtaaaatgaggacttttcgtgtatctttgccaagttctgcctcttttgcttcatactcagcatcagatatttatcaatcatgatacacttgaagcatgcaaatagtccctttggagatgagaaaatatgataaggaaatgtgaggtgaacggatcactttctttctcgttcaatggtagtacgggtgtagcgtacaccgggtatgtctcttgcacaggttgtacgtacacccgtacaaccccggttaagaacgctcctaagcaagatgcagtgtcgacaagcagcgcctgtcaagcgtagatgtacacagcgacaagtgtgcaatggacatggccaggcaatgctgctgcgtctgcagctgtcgacagtgatgttcggtcgcctcacaagtcacaatgcgcgcggcgcagtacgttgtgccgaatgagtccacgatggatccgggacgggtttcgagacgactgcggttgtgcgagacgtgctaacacagacctgctcaatttcgagttgctgcctgtcaaagatcatattattatgg
